(19) United States
(12) Patent Application Publication
(10) Pub. No.: US 2022/0259284 A1
(43) Pub. Date: Aug. 18, 2022

(54) CA2 COMPOSITIONS AND METHODS FOR TUNABLE REGULATION

(71) Applicant: Obsidian Therapeutics, Inc., Cambridge, MA (US)

(72) Inventors: Michael SCHEBESTA, Cambridge, MA (US); Michelle Lois FLEURY, Cambridge, MA (US); Kutlu Goksu ELPEK, Arlington, MA (US)

(21) Appl. No.: 17/596,281

(22) PCT Filed: Jun. 12, 2020
(86) PCT No.: PCT/US2020/037624

§ 371 Date: Dec. 7, 2021

Related U.S. Application Data
(60) Provisional application No. 62/860,383, filed on Jun. 12, 2019.

(51) Int. Cl. C07K 14/705; C07K 14/725; A61K 45/06; C12N 9/88; C12N 15/86

(52) U.S. Cl. CPC C07K 14/70575; C07K 14/7051; C12Y 402/01001; C12N 9/88; C12N 15/86; A61K 45/06

(57) ABSTRACT

The present disclosure provides regulatable biocircuit systems. Such systems provide modular and tunable protein expression systems in support of the discovery and development of therapeutic modalities.

### CROSS REFERENCE TO RELATED APPLICATIONS

[0001] This application claims benefit of priority to U.S. Provisional Application No. 62/860,383, filed Jun. 12, 2019. The entire contents of the aforementioned application are incorporated herein by reference in their entireties.

### REFERENCE TO THE SEQUENCE LISTING

[0002] The instant application contains a Sequence Listing which has been submitted electronically in ASCII format and is hereby incorporated by reference in its entirety. Said ASCII file, created on Jun. 11, 2020, is named 268052_469001_SL.txt and is 10,046,525 bytes in size.

### FIELD

[0003] The present disclosure relates to destabilizing domains (DDs) derived from human carbonic anhydrase 2 (CA2) which can tune protein stability for at least one payload, and compositions and methods of use thereof. Provided in the present disclosure include polypeptides of CA2 biocircuit systems, CA2 effector modules, stimulus response elements (SREs), polynucleotides encoding the same, vectors and cells containing the polypeptides and/or polynucleotides for use in cancer immunotherapy.

### BACKGROUND

[0004] Gene and cell therapies are revolutionizing medicine and offering new promise for the treatment of previously intractable conditions. However, most current technologies do not allow titration of the timing or levels of target protein induction. This has rendered many potential gene and cell therapy applications difficult or impossible to safely and effectively deploy.

[0005] Inadequate exogenous and/or endogenous gene control is a critical issue in many gene and cell therapy settings. This lack of tunability also makes it difficult to safely express proteins with narrow or uncertain therapeutic windows or those requiring more titrated or transient expression.

[0006] One approach to regulated protein expression or function is the use of Destabilizing Domains (DDs). Destabilizing domains are small protein domains that can be appended to a target protein of interest. DDs render the attached protein of interest unstable in the absence of a DD-binding ligand and the protein of interest is rapidly degraded by the ubiquitin-proteasome system of the cell. However, when a specific small molecule DD-binding ligand binds to the DD, the attached protein of interest is stabilized, and protein function is achieved.

[0007] DD technology forms the basis of a new class of cell and gene therapies that can deliver tunable and temporal control of gene expression and function, expanding the universe of protein therapeutics that can be safely and effectively incorporated into cell and gene therapy modalities.

### SUMMARY

[0008] The present disclosure provides novel protein domains derived from human carbonic anhydrase 2 (CA2) displaying small molecule dependent stability. Such protein domains are called destabilizing domains (DDs). In the absence of its binding ligand, the DD is destabilizing and causes degradation of a payload fused to the DD (e.g., a protein of interest (POI), while in the presence of its binding ligand, the fused DD and payload can be stabilized, and its stability is dose dependent.

[0009] Provided herein are biocircuit systems comprising at least one effector module. The effector module may include (a) a stimulus response element (SRE) which may include in whole or in part, the human carbonic anhydrase 2 such as but not limited to (CA2; SEQ ID NO. 5810) and (b) at least one payload, said at least one payload which is attached, appended or associated with said SRE. The payload may be whole CD40L or a portion of CD40L.

[0010] In some embodiments, the present disclosure provides stimulus response element (SRE) which may comprise a destabilizing domain (DD) derived from human carbonic anhydrase 2 (CA2; SEQ ID NO. 5810), in whole or in part. In one embodiment, the DD may include the whole CA2 (SEQ ID NO. 5810). In another embodiment, the DD may include amino acids 2 to 260 of CA2, such as but not limited to amino acids 2 to 260 of SEQ ID NO. 5810.

[0011] In one aspect, the present disclosure provides a polypeptide comprising an effector module, said effector module comprising: i) a stimulus response element (SRE), wherein the SRE comprises a drug responsive domain (DRD), said DRD comprising human carbonic anhydrase 2 (CA2; SEQ ID NO. 5810) or a region thereof, and further comprising one or more mutations relative to the amino acid sequence of SEQ ID NO. 5810; and ii) at least one payload which is operably linked to the SRE, wherein: (a) the payload comprises CD40L (SEQ ID NO. 6) or a portion thereof; or (b) the payload comprises CD40L (SEQ ID NO. 6) or a portion thereof comprising one or more mutations relative to the amino acid sequence of SEQ ID NO. 6.

[0012] In one embodiment, the DRD comprises a H122Y mutation in the amino acid at position 122 (H122) of SEQ ID NO. 5810. In another embodiment, the DRD further comprises: (i) a R27L mutation in the amino acid at position 27 (R27) of SEQ ID NO. 5810; (ii) a T87I mutation in the amino acid at position 87 (T87) of SEQ ID NO. 5810; (iii) a N252D mutation in the amino acid at position 252 (N252) of SEQ ID NO. 5810; or (iv) a combination of (i), (ii) and/or (iii).

[0013] In one embodiment, the DRD comprises a E106D mutation in the amino acid at position 106 (E106) of SEQ ID NO. 5810. In one embodiment, the DRD comprises a W208S mutation in the amino acid at position 208 (W208) of SEQ ID NO. 5810. In one embodiment, the DRD comprises a E106D mutation or a W208S mutation and further comprises a C205S mutation in the amino acid at position 205 (C205) of SEQ ID NO. 5810.

[0014] In one embodiment, the DRD comprises a I59N mutation in the amino acid at position 59 (I59) of SEQ ID NO. 5810. In another embodiment, the DRD further comprises a G102R mutation in the amino acid at position 102 (G102) of SEQ ID NO. 5810.

[0015] In one embodiment, the DRD comprises a L156H mutation in the amino acid at position 156 (L156) of SEQ ID NO. 5810. In another embodiment, the DRD further comprises: (i) a W4Y mutation in the amino acid at position 4 (W4) of SEQ ID NO. 5810; (ii) a F225L mutation in the amino acid at position 225 (F225) of SEQ ID NO. 5810; (iii) deletion of amino acids at positions 257-260 of SEQ ID NO. 5810; (iv) deletion of amino acids at positions 1-5 of SEQ ID NO. 5810; or (v) deletion of amino acids G234, E235 and P236 of SEQ ID NO. 5810. In another embodiment, the DRD comprises four mutations relative to SEQ ID NO. 5810, said mutations corresponding to: (i) L156H, S172C, F178Y, and E186D; or (ii) D70N, D74N, D100N, and L156H.

[0016] In one embodiment, the DRD comprises a first mutation and a second mutation relative to SEQ ID NO. 5810, wherein: (i) the first mutation is a S73N mutation in the amino acid at position 73 (S73) of SEQ ID NO. 5810; and (ii) the second mutation is a substitution of F or Y at the amino acid position 89 (R89) of SEQ ID NO. 5810.

[0017] In one embodiment, the DRD comprises a substitution of N or F at the amino acid position 56 (S56) of SEQ ID NO. 5810. In one embodiment, the DRD comprises two substitutions relative to SEQ ID NO. 5810 that correspond to S56F and D71S.

[0018] In one embodiment, the DRD comprises a S56N mutation in the amino acid at position 56 (S56) of SEQ ID NO. 5810.

[0019] In one embodiment, the DRD comprises one or more substitutions relative to SEQ ID NO. 5810, wherein at least one substitution is a substitution of D or N at the amino acid position 63 (G63) of SEQ ID NO. 5810, and wherein the one or more substitutions correspond to: G63D; G63D and M240L; G63D, E69V and N231I; or T55K, G63N and Q248N.

[0020] In one embodiment, the DRD comprises two or more substitutions relative to SEQ ID NO. 5810, wherein one of the two or more substitutions is a substitution of L or K at the amino acid position 71 (D71) of SEQ ID NO. 5810, and wherein said two or more substitutions correspond to: D71L and T87N; D71L and L250R; D71L, T87N and L250R; or D71K and T192F.

[0021] In one embodiment, the DRD comprises two or more substitutions relative to SEQ ID NO. 5810, wherein at least one of the two or more substitutions is: (i) a substitution of F at the amino acid position 241 (V241) of SEQ ID NO. 5810; or (ii) a substitution of F or L at the amino acid position 249 (P249) of SEQ ID NO. 5810; and wherein the two or more substitutions correspond to: D72F and V241F; D72F and P249L; D72F and P249F; D72F, V241F and P249L; A77I and P249F; or V241F and P249L.

[0022] In one embodiment, the DRD comprises one or more substitutions relative to SEQ ID NO. 5810, selected from Y51T, L183S, Y193I, L197P and the combination of V134F and L228F.

[0023] In some embodiments, the DRD comprises the region of human CA2 corresponding to amino acids 2 to 260 of SEQ ID NO. 5810.

[0024] In some embodiments, the DRD comprises the region of human CA2 corresponding to the full-length CA2 comprising amino acids 1 to 260 of SEQ ID NO. 5810.

[0025] In some embodiments, the SRE is responsive to one or more stimuli. In some embodiments, the stimulus is a small molecule, wherein the small molecule is selected from Acetazolamide, Celecoxib, Valdecoxib, Rofecoxib, Methazolamide, Dorzolamide, Brinzolamide, Diclofenamide, Ethoxzolamide, Zonisamide, Dansylamide, or Dichlorphenamide. In some embodiments, the small molecule is Acetazolamide.

[0026] In some embodiments, the payload is CD40L (SEQ ID NO. 6) or a portion thereof comprising at least one mutation.

[0027] In some embodiments, the payload is CD40L (SEQ ID NO. 6) or a portion thereof comprising at least two mutations, wherein the at least two mutations are selected from: (i) H224G and G226F; (ii) H224G and G226H; (iii) Y172G and G226F; (iv) H125 and G227; (v) Y120G, H224G and G226W; and (vi) S110G, F111G, E112S, M113G, Q114G, and K115S.

[0028] In some embodiments, the payload is CD40L (SEQ ID NO: 6).

[0029] In some embodiments, the DRD is N-terminally located to the payload.

[0030] In some embodiments, the DRD is separated from the payload by a linker.

[0031] In some embodiments, the effector module further comprises a signal peptide, a targeting and/or penetrating peptide, a linker, a protein tag, and/or a protein cleavage site.

[0032] In some embodiments, the present disclosure provides a composition comprising a polypeptide as described herein.

[0033] In some embodiments, the present disclosure provides a composition comprising an effector module as described herein.

[0034] In some embodiments, the present disclosure provides a polynucleotide encoding the effector module as described herein, wherein the polynucleotide is a DNA molecule or an RNA molecule. In some embodiments, the polynucleotide is monocistronic, bicistronic or multicistronic.

[0035] In one embodiment, the polynucleotide is bicistronic and encodes a second polypeptide, wherein said second polypeptide comprises an immunotherapeutic agent selected from an antibody and fragments and variants thereof, a T cell receptor (TCR) and variants thereof, a chimeric antigen receptor (CAR), a chimeric switch receptor, an inhibitor of a co-inhibitory receptor or ligand, an agonist of a co-stimulatory receptor and ligand, a cytokine, chemokine, a cytokine receptor, a chemokine receptor, cytokine-cytokine receptor fusion, a soluble growth factor, a metabolic factor, a suicide gene, or a homing receptor. In one embodiment, the polynucleotide is multicistronic and encodes at least two additional polypeptides, wherein said at least two additional polypeptides comprise an immunotherapeutic agent selected from an antibody and fragments and variants thereof, a T cell receptor (TCR) and variants thereof, a chimeric antigen receptor (CAR), a chimeric switch receptor, an inhibitor of a co-inhibitory receptor or ligand, an agonist of a co-stimulatory receptor and ligand, a cytokine, chemokine, a cytokine receptor, a chemokine receptor, cytokine-cytokine receptor fusion, a soluble growth factor, a metabolic factor, a suicide gene, or a homing receptor. In some embodiments, the second polypeptide is or the at least two additional polypeptides are operably linked to a second SRE. In some embodiments, the second polypeptide is not, or the at least two additional polypeptides are not, operably linked to any SRE.

[0036] In some embodiments, the present disclosure provides a vector comprising any of the polynucleotides described herein. In some embodiments, the vector is a viral vector or a plasmid. In some embodiments, the vector is a viral vector and the viral vector is a retroviral vector, a lentiviral vector, a gamma-retroviral vector, a recombinant AAV vector, an adenoviral vector, or an oncolytic viral vector.

[0037] In some embodiments, the present disclosure provides a cell transduced or transfected with the vector as described herein.

[0038] In some embodiments, the present disclosure provides a cell comprising at least one of: the effector module, the polynucleotide, or the vector as described herein.

[0039] In some embodiments, the cell of the present disclosure is an immune cell for adoptive cell transfer (ACT); or a CD8+ T cell, a CD4+ T cell, a helper T cell, a natural killer (NK) cell, a NKT cell, a cytotoxic T lymphocyte (CTL), a tumor infiltrating lymphocyte (TIL), a memory T cell, a regulatory T (Treg) cell, a cytokine-induced killer (CIK) cell, a dendritic cell, lymphokine activated killer (LAK) cells, a human embryonic stem cell, a mesenchymal stem cell, a hematopoietic stem cell, or a mixture thereof. In some embodiments, said cell is modified to express a chimeric antigen receptor (CAR) or an antigen-specific T cell receptor (TCR). In one embodiment, said cell is a T cell or NK cell.

[0040] In some embodiments, the present disclosure provides a cell which expresses the effector module, and/or comprises the polynucleotide, and/or is infected or transfected with the vector as described herein, wherein, said cell is a T cell modified to express an antigen-specific T cell receptor (TCR) or an antigen-specific chimeric antigen receptor (CAR).

[0041] In some embodiments, the present disclosure provides a pharmaceutical composition comprising the polypeptide, the polynucleotides, the vector, or the cell as described herein, and a pharmaceutically acceptable excipient.

[0042] In some embodiments, the present disclosure provides a method of producing a modified cell, said method comprising introducing into a cell a nucleic acid molecule comprising the polynucleotide as described herein.

[0043] In some embodiments, the present disclosure provides a method of modulating expression, function, and/or level of a payload in the cell as described herein, said method comprising administering to the cell a stimulus, wherein the SRE is responsive to the stimulus and wherein the expression, function, and/or level of the at least one payload is modulated in response to the stimulus.

[0044] In some embodiments, the present disclosure provides a method of treating a disease and/or inducing an immune response in a subject in need thereof, said method comprising: (a) administering to the subject a therapeutically effective amount of any of the compositions, polypeptides, polynucleotides, vectors, or cells described herein and administering to the subject a therapeutically effective amount of a stimulus, wherein the SRE is responsive to the stimulus and wherein expression of the at least one payload is modulated in response to the stimulus to thereby treat the disease and/or induce an immune response. In one embodiment, the disease is cancer. In some embodiments, the stimulus is selected from Acetazolamide, Celecoxib, Valdecoxib, Rofecoxib, Methazolamide, Dorzolamide, Brinzolamide, Diclofenamide, Ethoxzolamide, Zonisamide, Dansylamide, or Dichlorphenamide.

[0045] In another aspect of the present disclosure, provided is an engineered cell comprising: (i) a first polynucleotide which encodes a first polypeptide, said first polypeptide comprising: (a) a first stimulus response element (SRE), wherein the first SRE comprises a drug responsive domain (DRD), said DRD comprising human carbonic anhydrase 2 (CA2; SEQ ID NO. 5810) or a region thereof, and further comprising one or more mutations relative to the amino acid sequence of SEQ ID NO. 5810; and (b) a first payload which is operably linked to the first SRE, wherein: (I) the first payload comprises CD40L (SEQ ID NO. 6) or a portion thereof; or (II) the first payload comprises CD40L (SEQ ID NO. 6) or a portion thereof comprising one or more mutations relative to the amino acid sequence of SEQ ID NO. 6; and (ii) a second polynucleotide which encodes one or more additional polypeptides, said one or more additional polypeptides comprising an immunotherapeutic agent selected from the group consisting of: a T cell receptor (TCR) and variants thereof or a chimeric antigen receptor (CAR); wherein the DRD and the first payload are destabilized in the absence of a first stimulus and wherein the DRD and the first payload are stabilized in the presence of the first stimulus, and the one or more additional polypeptides are expressed independently of the first payload.

[0046] In some embodiments, the first payload is (a) CD40L (SEQ ID NO. 6) or a portion thereof comprising at least one mutation; or (b) CD40L (SEQ ID NO. 6) or a portion thereof comprising at least two mutations, optionally, wherein the at least two mutations are selected from: (i) H224G and G226F; (ii) H224G and G226H; (iii) Y172G and G226F; (iv) H125 and G227; (v) Y120G, H224G and G226W; and (vi) S110G, F111G, E112S, M113G, Q114G, and K115S.

[0047] In some embodiments, the one or more additional polypeptides are linked to a second SRE comprising a second DRD, wherein the second DRD is the same or different as the DRD in the first SRE, the second DRD and the one or more additional polypeptides are destabilized in the absence of the first or a second stimulus and wherein the second DRD and the one or more additional polypeptides are stabilized in the presence of the first or the second stimulus.

[0048] In some embodiments, the present disclosure provides a DD comprising a region of or the whole human carbonic anhydrase 2 (CA2; SEQ ID NO. 5810), and further comprising a mutation relative to SEQ ID NO. 5810 selected from A115L, A116Q, A116V, A133L, A133T, A141P, A152D, A152L, A152R, A173C, A173G, A173L, A173T, A23P, A247L, A247S, A257L, A257S, A38P, A38V, A54Q, A54V, A54X, A65L, A65N, A65V, A77I, A77P, A77Q, C205M, C205R, C205V, C205W, C205Y, D101G, D101M, D11I, D129I, D138G, D138M, D138N, D161*, D161M, D161V, D164G, D164I, D174*, D174T, D179E, D179I, D179R, D189G, D189I, D19T, D19V, D242G, D242T, D32T, D34T, D41T, D52I, D52L, D71F, D71G, D71K, D77I M, D71S, D71Y, D72I, D72S, D72T, D72X, D75T, D75V, D85M, E106D, E106G, E106S, E117*, E117N, E14N, E186*, E186N, E204A, E204D, E204G, E204N, E213*, E213G, E213N, E220K, E220R, E220S, E233D, E233G, E233R, E235*, E235G, E235N, E237K, E237R, E238*, E238N, E238R, E26S, E69D, E69K, E69S, F130L, F146V, F175I, F175L, F175S, F178L, F178S, F20L, F20S, F225I, F225L, F225S, F225Y, F230I, F230L, F230S, F259L, F259S, F66S, F70I, F70L, F95Y, G102D, G104R, G104V, G128R, G12D, G12E, G131E, G131R, G131W, G139D, G144D, G144V, G150A, G150S, G150W, G155A, G155C, G155D, G155S, G170A, G170D, G182A, G182W, G195A, G195R, G232R, G232W, G234L, G234V, G25E, G63D, G63V, G81E, G81V, G82D, G86A, G86D, G98V, H107I, H107Q, H119T, H119Y, H122T, H122Y, H15L, H15T, H15Y, H1D, H17I, H36I, H36Q, H64M, H94T, H96T, I145F, I145M, I166H, I166L, I209D, I209L, I215H, I215S, I22L, I255N, I255S, I33S, I59F, I59N, I59S, I91F, K111E, K111N, K112R, K113I, K113N, K126N, K132E, K132R, K148E, K148R, K153*, K153N, K158E, K158N, K167*, K169N, K169R, K171Q, K171R, K18R, K212N, K212Q, K212R, K212W, K224E, K224N, K227*, K227N, K24R, K251E, K251R, K256Q, K260F, K260L, K260Q, K39S, K45N, K45S, K80M, K80R, L118F, L120W, L140V, L140W, L143*, L147*, L147F, L156F, L156H, L156P, L156Q, L163A, L163W, L183P, L183S, L184F, L184P, L188P, L188W, L197*, L197M, L197P, L197R, L197T, L202F, L202H, L202I, L202P, L202R, L202S, L203P, L203S, L203W, L211*, L211A, L211S, L223*, L2231, L223V, L228F, L228H, L228T, L239*, L239F, L239T, L250*, L250P, L250T, L44*, L44M, L47C, L47V, L57*, L57X, L60S, L79F, L79S, L84W, L90*, L90V, M240D, M240L, M240R, M240W, N11D, N11K, N124T, N177*, N177T, N229*, N229T, N231D, N231F, N231K, N231L, N231M, N231Q, N231T, N243Q, N243T, N252E, N252T, N61R, N61T, N61Y, N62K, N62M, N67D, N67T, P137L, P13A, P13H, P13L, P13S, P154L, P154R, P154T, P180L, P180S, P185L, P185S, P185V, P194Q, P200A, P200L, P200S, P200T, P201A, P201L, P201R, P201S, P214T, P236L, P236T, P246L, P246Q, P249A, P249F, P249H, P249I, P249X, P30L, P30S, P42L, P83A, Q103K, Q135S, Q136N, Q157R, Q157S, Q221A, Q221R, Q248F, Q248L, Q248S, Q254A, Q254K, Q28S, Q53H, Q53K, Q53N, Q74R, Q92H, Q92S, R181H, R181S, R181V, R226H, R226P, R226V, R245A, R253G, R253Q, R27A, R58G, R89D, R89F, R89I, R89X, R89Y, S105L, S105Q, S151A, S151I, S151Q, S165F, S165P, S172E, S172V, S187I, S187P, S196H, S196L, S216A, S216Q, S218A, S218Q, S219A, S219Q, S258F, S258P, S29C, S29P, S43P, S43T, S48L, S50P, S56F, S56N, S56P, S56X, S73L, S73N, S73X, S99H, T108L, T125I, T125P, T168K, T168N, T168Q, T176H, T176L, T192D, T192F, T1921, T192N, T192P, T192X, T198D, T1981, T198P, T199A, T199H, T199P, T207D, T207I, T207P, T207S, T35I, T35L, T37Q, T55L, T87L, V109M, V109W, V121F, V134C, V134F, V142F, V149G, V149L, V159L, V159S, V160C, V160L, V162A, V162C, V206*, V206C, V206M, V210C, V217L, V217R, V217S, V222A, V222C, V222G, V241G, V241W, V241X, V31L, V49F, V68L, V68W, V78C, W123G, W123R, W16G, W191*, W191G, W191L, W208G, W208L, W208S, W244*, W244G, W244L, W97C, W97G, Y114H, Y114M, Y127M, Y190*, Y190L, Y190T, Y193C, Y193F, Y193I, Y193L, Y193T, Y193V, Y193X, Y40M, Y51F, Y51M, Y51T, Y51X, Y88T, K9N, and S29A. As used herein, “*” indicates the translation of the stop codon and “X” indicates any amino acid.

[0049] In some embodiments, the present disclosure provides a DD comprising a region of or the whole human carbonic anhydrase 2 (CA2; SEQ ID NO. 5810), and further comprising a mutation relative to SEQ ID NO. 5810 selected from E106D, G63D, H122Y, 159N, L156H, L183S, L197P, S56F, S56N, W208S, Y193I, and Y51T.

[0050] In some embodiments, the present disclosure provides a DD comprising a region of or the whole human carbonic anhydrase 2 (CA2; SEQ ID NO. 5810), and further comprising two or more mutations relative to SEQ ID NO. 5810. In some embodiments, a DD may comprise CA2 (aa 2-260 of WT, R27L, H122Y), CA2 (aa 2-260 of WT, T87I, H122Y), CA2 (aa 2-260 of WT, H122Y, N252D), CA2 (aa 2-260 of WT, D72F, V241F), CA2 (aa 2-260 of WT, V241F, P249L), CA2 (aa 2-260 of WT, D72F, P249L), CA2 (aa 2-260 of WT, D71L, L250R), CA2 (aa 2-260 of WT, D72F, P249F), CA2 (aa 2-260 of WT, T55K, G63N, Q248N), CA2 (aa 2-260 of WT, L156H, A257del, S258del, F259del, K260del), CA2 (aa 2-260 of WT, L156H, S2del, H3del, H4del, W5del), CA2 (aa 2-260 of WT, W4Y, L156H), CA2 (aa 2-260 of WT, L156H, G234del, E235del, P236del), CA2 (aa 2-260 of WT, L156H, F225L), CA2 (aa 2-260 of WT, D70N, D74N, D100N, L156H), (CA2 (aa 2-260 of WT, I59N, G102R), CA2 (aa 2-260 of WT, G63D, E69V, N231I), CA2 (aa 2-260 of WT, R27L, T87I, H122Y, N252D), CA2 (aa 2-260 of WT, D72F, V241F, P249L), CA2 (aa 2-260 of WT, D71L, T87N, L250R), CA2 (aa 2-260 of WT, L156H, S172C, F178Y, E186D), CA2 (aa 2-260 of WT, D71F, N231F), CA2 (aa 2-260 of WT, A77I, P249F), CA2 (aa 2-260 of WT, D71K, P249H), CA2 (aa 2-260 of WT, D72F, P249H), CA2 (aa 2-260 of WT, Q53N, N61Y), CA2 (aa 2-260 of WT, E106D, C205S), CA2 (aa 2-260 of WT, C205S, W208S), CA2 (aa 2-260 of WT, S73N, R89Y), CA2 (aa 2-260 of WT, D71K, T192F), CA2 (aa 2-260 of WT, Y193L, K260L), CA2 (aa 2-260 of WT, D71F, V241F, P249L), CA2 (aa 2-260 of WT, L147F, Q248F), CA2 (aa 2-260 of WT, D52I, S258P), CA2 (aa 2-260 of WT, D72S, T192N), CA2 (aa 2-260 of WT, D179E, T192I), CA2 (aa 2-260 of WT, S56N, Q103K), CA2 (aa 2-260 of WT, D71Y, Q248L), CA2 (aa 2-260 of WT, S73N, R89F), CA2 (aa 2-260 of WT, D71K, N231L, E235G, L239F), CA2 (aa 2-260 of WT, D72F, P249I), CA2 (aa 2-260 of WT, D72X, V241X, P249X), CA2 (aa 2-260 of WT, A54X, S56X, L57X, T192X), CA2 (aa 2-260 of WT, Y193V, K260F), CA2 (aa 2-260 of WT, G63D, M240L), CA2 (aa 2-260 of WT, V134F, L228F), CA2 (aa 2-260 of WT, D71G, N231K), CA2 (aa 2-260 of WT, S56F, D71S), CA2 (aa 2-260 of WT, D52L, G128R, Q248F), CA2 (aa 2-260 of WT, S73X, R89X), CA2 (aa 2-260 of WT, Y51X, D72X, V241X, P249X), CA2 (aa 2-260 of WT, D72I, W97C), CA2 (aa 2-260 of WT, D71K, T192F, N231F), CA2 (aa 2-260 of WT, H36Q, S43T, Y51F, N67D, G131W, R226H), CA2 (aa 2-260 of WT, F70I, F146V), CA2 (aa 2-260 of WT, K45N, V68L, H119Y, K169R, D179E), CA2 (aa 2-260 of WT, H15L, A54V, K111E, E220K, F225I), CA2 (aa 2-260 of WT, P13S, P83A, D101G, K111N, F230I), CA2 (aa 2-260 of WT, G63D, W123R, E220K), CA2 (aa 2-260 of WT, N11D, E69K, G86D, V109M, K113I, T125I, D138G, G155S), CA2 (aa 2-260 of WT, I59N, G102R, A173T), CA2 (aa 2-260 of WT, L79F, P180S), CA2 (aa 2-260 of WT, A77P, G102R, D138N), CA2 (aa 2-260 of WT, F20L, K45N, G63D, E69V, N231I), CA2 (aa 2-260 of WT, T199N, L202P, L228F), CA2 (aa 2-260 of WT, K9N, H122Y, T168K), CA2 (aa 2-260 of WT, Q53H, L90V, Q92H, G131E), CA2 (aa 2-260 of WT, L44M, L47V, N62K, E69D), CA2 (aa 2-260 of WT, D75V, K169N, F259L), CA2 (aa 2-260 of WT, T207S, V222A, N231D), CA2 (aa 2-260 of WT, I59F, V206M, G232R), CA2 (aa 2-260 of WT, P13A, A133T), CA2 (aa 2-260 of WT, I59N, R89I), CA2 (aa 2-260 of WT, A65N, G86D, G131R, G155D, K158N, V162A, G170D, P236L), CA2 (aa 2-260 of WT, G12R, H15Y, D19V), CA2 (aa 2-260 of WT, A65V, F95Y, E106G, H107Q, I145M, F175I), CA2 (aa 2-260 of WT, G63D, E69V, N231I), CA2 (aa 2-260 of WT, S29A, C205S) and/or CA2 (aa 2-260 of WT, S29C, C205S). As used herein, “X” indicates any amino acid.

[0051] In some embodiments, a DD may comprise CA2 (aa 2-260 of WT, R27L, H122Y), CA2 (aa 2-260 of WT, T87I, H122Y), CA2 (aa 2-260 of WT, H122Y, N252D), CA2 (aa 2-260 of WT, D72F, V241F), CA2 (aa 2-260 of WT, V241F, P249L), CA2 (aa 2-260 of WT, D72F, P249L), CA2 (aa 2-260 of WT, D71L, L250R), CA2 (aa 2-260 of WT, D72F, P249F), CA2 (aa 2-260 of WT, T55K, G63N, Q248N), CA2 (aa 2-260 of WT, L156H, A257del, S258del, F259del, K260del), CA2 (aa 2-260 of WT, L156H, S2del, H3del, H4del, W5del), CA2 (aa 2-260 of WT, W4Y, L156H), CA2 (aa 2-260 of WT, L156H, G234del, E235del, P236del), CA2 (aa 2-260 of WT, L156H, F225L), CA2 (aa 2-260 of WT, D70N, D74N, D100N, L156H), (CA2 (aa 2-260 of WT, I59N, G102R), CA2 (aa 2-260 of WT, G63D, E69V, N231I), CA2 (aa 2-260 of WT, R27L, T87I, H122Y, N252D), CA2 (aa 2-260 of WT, D72F, V241F, P249L), CA2 (aa 2-260 of WT, D71L, T87N, L250R), CA2 (aa 2-260 of WT, L156H, S172C, F178Y, E186D), CA2 (aa 2-260 of WT, A77I, P249F), CA2 (aa 2-260 of WT, E106D, C205S), CA2 (aa 2-260 of WT, C205S, W208S), CA2 (aa 2-260 of WT, S73N, R89Y), CA2 (aa 2-260 of WT, D71K, T192F), CA2 (aa 2-260 of WT, S73N, R89F), CA2 (aa 2-260 of WT, G63D, M240L), CA2 (aa 2-260 of WT, V134F, L228F), and/or CA2 (aa 2-260 of WT, S56F, D71S).

[0052] The biocircuit systems described herein may be responsive to one or more stimuli. Such stimuli may be small molecules, such as but not limited to, Acetazolamide, Celecoxib, Valdecoxib, Rofecoxib, Methazolamide, Dorzolamide, Brinzolamide, Diclofenamide, Ethoxzolamide, Zonisamide, Dansylamide, and Dichlorphenamide. In one embodiment, the small molecule may be Acetazolamide. In one embodiment, the stimulus may be Celecoxib.

[0053] In some embodiments, the payload may be the whole or a portion of CD40L. In one embodiment, the payload may be the whole CD40L (SEQ ID NO. 6). In some embodiments, the payload may be a portion of CD40L comprising: (i) sCD40L (113-261 of WT) (SEQ ID NO. 5800); (ii) CD40L (aa 14-261 of WT) (SEQ ID NO.5802); or (iii) CD40L (aa 14-261 of WT, (5110-G116) del) (SEQ ID NO. 5804).

[0054] In some embodiments, the payload may be CD40L with one or more mutations as compared to (i) sCD40L (113-261 of WT) (SEQ ID NO. 5800); (ii) CD40L (aa 14-261 of WT) (SEQ ID NO.5802); or (iii) CD40L (aa 14-261 of WT, (5110-G116) del) (SEQ ID NO. 5804).

[0055] In some embodiments, the payload may be CD40L with one or more mutations as compared to wild-type CD40L (amino acid sequence provided as SEQ ID NO. 6). In some aspects the CD40L comprises at least one mutation such as, but not limited to, S110G, F1I1G, E112S, M113G, Q114G, K115S, Y120G, H125G, Y172G, H224G, G226F, G226H, G226W, and G227F. The CD40L payload may comprise two mutations, and the mutations may be, but are not limited to, H224G and G226F, H224G and G226H, Y172G and G226F, or H125 and G227. The CD40L payload may comprise three mutations, and the mutations may be, but are not limited to, Y120G, H224G and G226W. The CD40L payload may comprise four mutations. The CD40L payload may comprise five mutations. The CD40L payload may comprise six mutations and the mutations may be, but are not limited to, S110G, F111G, E112S, M113G, Q114G, and K115S.

[0056] Also provided herein are polynucleotides encoding the SREs, biocircuit systems, polypeptides and/or compositions described herein as well as vectors comprising the polynucleotides and cells comprising the polynucleotides. The present disclosure also describes pharmaceutical compositions that include components of CA2 biocircuit systems and/or the compositions described herein and a pharmaceutically acceptable excipient.

[0057] The present disclosure provides suitable examples and embodiments which describes the use of the various compositions, biocircuit systems, and components thereof, to treat a disease in a person in need thereof. For example, a method for treating a disease and/or inducing an immune response in a subject in need thereof, comprises the steps of (a) administering to the subject a therapeutically effective amount of a composition (comprising: an effector module, wherein the effector module comprises: i) a stimulus response element (SRE), wherein the SRE comprises a drug responsive domain (DRD), said DRD comprising human carbonic anhydrase 2 (CA2; SEQ ID NO. 5810) or a region thereof, and further comprising one or more mutations relative to the amino acid sequence of SEQ ID NO. 5810; and ii) at least one payload which is operably linked to the SRE, wherein (a) the payload comprises CD40L (SEQ ID NO. 6) or a portion thereof; or (b) the payload comprises CD40L (SEQ ID NO. 6) or a portion thereof comprising one or more mutations relative to the amino acid sequence of SEQ ID NO. 6), or a polynucleotide which encodes the composition components, or a vector that contains such polynucleotides which encode the components of the composition, or a cell which contains such vector, which is able to synthesize the components of the composition described herein; and (b) administering to the subject a therapeutically effective amount of a stimulus, for example, Acetazolamide, Celecoxib, Valdecoxib, Rofecoxib, Methazolamide, Dorzolamide, Brinzolamide, Diclofenamide, Ethoxzolamide, Zonisamide, Dansylamide, or Dichlorphenamide, wherein the SRE is responsive to the stimulus and wherein expression of the at least one payload is modulated in response to the stimulus to thereby treat the disease and/or induce an immune response.

[0058] Exemplary diseases that can be treated and/or prevented using the biocircuit systems and engineered cells herein can include: immune diseases, autoimmune diseases, infections diseases and hyperproliferative diseases, for example, cancer.

### DETAILED DESCRIPTION

[0059] The details of one or more embodiments of the present disclosure are set forth in the accompanying description below. Although any materials and methods similar or equivalent to those described herein can be used in the practice or testing of the present disclosure, the preferred materials and methods are now described. Other features, objects and advantages of the present disclosure will be apparent from the description. In the description, the singular forms also include the plural unless the context clearly dictates otherwise. Unless defined otherwise, all technical and scientific terms used herein have the same meaning as commonly understood by one of ordinary skill in the art to which this present disclosure belongs. In the case of conflict, the present description will control.

### I. Compositions

### Biocircuits or Biocircuit Systems

[0060] According to the present disclosure, biocircuit systems are provided which comprise, at their core, at least one effector module. Such effector module(s) are independently having associated, or integral therewith, one or more stimulus response elements (SREs). In general, a stimulus response element (SRE) may be operably linked to a payload which could be any protein of interest (POI) (e.g., an immunotherapeutic agent), to form an effector module. The SRE, when activated by a particular stimulus, e.g., a small molecule, can produce a signal or outcome, to regulate transcription and/or protein levels of the linked payload either up or down by perpetuating a stabilizing signal or destabilizing signal, or any other types of regulation. A much-detailed description of a biocircuit system are taught in co-owned U.S. Provisional Patent Application No. 62/320,864 filed Apr. 11, 2016, 62/466,596 filed Mar. 3, 2017 and the International Publication WO2017/180587 (the contents each of which are herein incorporated by reference in their entirety). In accordance with the present disclosure, biocircuit systems, effector modules, SREs and components that tune expression levels and activities of any agents used for immunotherapy are provided.

[0061] As used herein, a “biocircuit” or “biocircuit system” is defined as a circuit within or useful in biologic systems comprising a stimulus and at least one effector module responsive to a stimulus, where the response to the stimulus produces at least one signal or outcome within, between, as an indicator of, or on a biologic system. Biologic systems are generally understood to be any cell, tissue, organ, organ system or organism, whether animal, plant, fungi, bacterial, or viral. It is also understood that biocircuits may be artificial circuits which employ the stimuli or effector modules taught by the present disclosure and effect signals or outcomes in acellular environments such as with diagnostic, reporter systems, devices, assays or kits. The artificial circuits may be associated with one or more electronic, magnetic, or radioactive components or parts.

### Effector Modules

[0062] The biocircuits of the disclosure include at least one effector module. As used herein, an “effector module” is a single or multi-component construct or complex comprising at least (a) one or more stimulus response elements (SREs) and (b) one or more payloads (e.g. proteins of interest (POIs)).

[0063] Effector modules may be designed to include one or more payloads, one or more SREs, one or more cleavage sites, one or more signal sequences and one or more additional features including the presence or absence of one or more linkers. Representative effector module embodiments of the present disclosure are illustrated in FIGS. 2-6 in International Publication No. WO2017/180587, the contents of which are herein incorporated by reference in their entirety. Biocircuits and components utilizing such effector molecules are given in FIGS. 7-12 in International Publication No. WO2017/180587, the contents of which are herein incorporated by reference in their entirety.

[0064] As shown in FIG. 2 in International Publication No. WO2017/180587, representative effector module embodiments comprising one payload, i.e. one immunotherapeutic agent are illustrated. Each component of the effector module may be located or positioned in various arrangements without (A to F) or with (G to Z, and AA to DD) a cleavage site. An optional linker may be inserted between each component of the effector module.

[0065] FIGS. 3 to 6 in International Publication No. WO2017/180587, illustrate representative effector module embodiments comprising two payloads, i.e. two immunotherapeutic agents. In some aspects, more than two immunotherapeutic agents (payloads) may be included in the effector module under the regulation of the same SRE (e.g., the same DD). The two or more agents may be either directly linked to each other or separated. The SRE may be positioned at the N terminus of the construct, or the C terminus of the construct, or in the internal location.

[0066] The combination of the T regulatory cells, myeloid derived suppressor cells (MDSCs) and the extensive stromal networks within the tumor microenvironment (TME) can dampen the antitumor immune response by preventing T-cell infiltration and/or activation by current immunotherapies (see Ma et al. A CD40 agonist and PD-1 antagonist antibody reprogram the microenvironment of non-immunogenic tumors to allow T cell-mediated anticancer activity. Cancer Immunol Res Jan. 14, 2019; doi: 10.1158/2326-606.CIR-18-0061; the contents of which are herein incorporated by reference in their entireties). Current CAR T therapies are not effective as the therapeutics have immunosuppression, tumor antigen escape, insufficient CAR T expansion and healthy tissue toxicity. The present disclosure addresses these issues with the utilization of an effector module with CD40L as an immunotherapeutic agent, fused to an SRE described herein. The CD40L may not be the only immunotherapeutic agent in the effector module. The effector module may also include a CAR construct. The combination of the CD40L and CAR as the immunotherapeutic agent and an SRE may cause any of the following alone or in combination, (1) repolarization of the CD40+ macrophages in the tumor microenvironment to a proinflammatory state, (2) activation of CD40+ dendritic cells to promote epitope spreading which can decrease tumor antigen escape (e.g., decrease the loss of CAR targeted antigens), (3) reverse signaling and cytokine production to enhance the antigen-dependent T cell expansion, and (4) regulatable protein production from the SRE which lowers toxicity of the therapeutic to healthy tissue. As a non-limiting example, an effector module including an SRE fused to a CD40L and CAR immunotherapeutic agent may be used to overcome the loss of CAR targeted antigens (e.g., antigen escape) by causing dendritic cells to recruit tumor infiltration lymphocytes (TILs) which results in the expansion of the group of anti-tumor specific T cells. As a non-limiting example, an effector module including an SRE fused to a CD40L and CAR immunotherapeutic agent may be used to reduce the constraint of the tumor microenvironment (TME) of solid tumors by repolarizing tumor associated macrophages (TAMs) from a suppressive to an inflammatory phenotype. As a non-limiting example, an effector module including an SRE fused to a CD40L and CAR immunotherapeutic agent may be used to increase CAR T cell expansion by causing antigen-dependent T cell expansion

[0067] In some embodiments, biocircuits of the present disclosure may be modified to reduce their immunogenicity. Immunogenicity is the result of a complex series of responses to a substance that is perceived as foreign and may include the production of neutralizing and non-neutralizing antibodies, formation of immune complexes, complement activation, mast cell activation, inflammation, hypersensitivity responses, and anaphylaxis. Several factors can contribute to protein immunogenicity, including, but not limited to protein sequence, route and frequency of administration and patient population. In a preferred embodiment, protein engineering may be used to reduce the immunogenicity of the compositions of the disclosure. In some embodiments, modifications to reduce immunogenicity may include modifications that reduce binding of the processed peptides derived from the parent sequence to MHC proteins. For example, amino acid modifications may be engineered such that there are no or a minimal of number of immune epitopes that are predicted to bind with high affinity, to any prevalent MHC alleles. Several methods of identifying MHC binding epitopes of known protein sequences are known in the art and may be used to score epitopes in the compositions of the present disclosure. Such methods are disclosed in US Patent Publication No. US 20020119492, US20040230380, and US 20060148009; the contents of each of which are incorporated by reference in their entirety.

[0068] Effector modules, including their SREs and payloads, may be nucleic acid-based, protein-based or a combination thereof. They may be in the form of DNA, RNA, mRNA, proteins, fusion proteins, or any combination of the foregoing.

### Stimulus Response Element (SRE)

[0069] As used herein a “stimulus response element” (SRE) is a component of an effector module which is joined, attached, linked to or associated with one or more payloads and in some instances, is responsible for the responsive nature of the effector module to one or more stimuli. As used herein, the “responsive” nature of an SRE to a stimulus may be characterized by a covalent or non-covalent interaction, a direct or indirect association or a structural or chemical reaction to the stimulus. Further, the response of any SRE to a stimulus may be a matter of degree or kind. The response may be a partial response. The response may be a reversible response. The response may ultimately lead to a regulated signal or output. Such output signal may be of a relative nature to the stimulus, e.g., producing a modulatory effect of between 1% and 100% or a factored increase or decrease such as 2-fold, 3-fold, 4-fold, 5-fold, 10-fold or more. In some embodiments, the SRE is a polypeptide fused to a polypeptide payload.

[0070] In some embodiments, the present disclosure provides methods for modulating protein expression, function or level. In some aspects, the modulation of protein expression, function or level refers to modulation of expression, function or level by at least about 20%, such as by at least about 30%, 40%, 50%, 60%, 70%, 80%, 85%, 90%, 95% and 100%, or at least 20-30%, 20-40%, 20-50%, 20-60%, 20-70%, 20-80%, 20-90%, 20-95%, 20-100%, 30-40%, 30-50%, 30-60%, 30-70%, 30-80%, 30-90%, 30-95%, 30-100%, 40-50%, 40-60%, 40-70%, 40-80%, 40-90%, 40-95%, 40-100%, 50-60%, 50-70%, 50-80%, 50-90%, 50-95%, 50-100%, 60-70%, 60-80%, 60-90%, 60-95%, 60-100%, 70-80%, 70-90%, 70-95%, 70-100%, 80-90%, 80-95%, 80-100%, 90-95%, 90-100% or 95-100%.

[0071] Effector modules, including their SREs and payloads may individually, collectively or independently comprise peptides, polypeptides or proteins. At the protein level, such payload may be any natural or artificial peptide or polypeptide or fragment thereof. Natural peptides or polypeptide components of the payload may be derived from any known protein of any species.

[0072] Effector modules may be designed to operate in groups of one, two, three, four or more modules. When more than one effector module is utilized in a biocircuit, it is known as an effector module system of that biocircuit.

### Destabilizing Domains

[0073] Destabilizing domains (DDs) are small protein domains that can be appended to a target protein of interest. The term destabilizing domain (DD) is interchangeable with the term drug responsive domain (DRD). DDs render the attached protein of interest unstable in the absence of a DD-binding ligand such that the protein is rapidly degraded by the ubiquitin-proteasome system of the cell (Stankunas, K., et al., Mol. Cell, 2003, 12: 1615-1624; Banaszynski, et al., Cell; 2006, 126(5): 995-1004; reviewed in Banaszynski, L. A., and Wandless, T. J. Chem. Biol.; 2006, 13:11-21 and Rakhit R et al., Chem Biol. 2014; 21(9):1238-1252). However, when a specific small molecule ligand binds its intended DD as a ligand binding partner, the instability is reversed, and protein function is restored. The conditional nature of DD stability allows a rapid and non-perturbing switch from stable protein to unstable substrate for degradation. Moreover, its dependency on the concentration of its ligand further provides tunable control of degradation rates.

[0074] In one embodiment, the SRE is a destabilizing domain (DD). The presence, absence or an amount of a small molecule ligand that binds to or interacts with the DD, can, upon such binding or interaction modulate the stability of the payload(s) and consequently the function of the payload. Depending on the degree of binding and/or interaction the altered function of the payload may vary, hence providing a “tuning” of the payload function.

[0075] In some embodiments, the desired characteristics of the DDs may include, but are not limited to, low protein levels in the absence of a ligand of the DD (e.g., low basal stability), large dynamic range, robust and predictable dose-response behavior, and rapid kinetics of degradation. DDs that bind to a desired ligand, but not endogenous molecules may be preferred.

[0076] In some embodiments, the DDs of the present disclosure may be developed from known proteins herein referred to as the parent protein. In some embodiments, the CA2 destabilizing domains described herein or known in the art may be used as SREs in the biocircuit systems of the present disclosure in association with any of the payloads (e.g., proteins of interest or immunotherapeutic agents) taught herein.

[0077] Regions or portions or domains of wild type proteins (e.g., CA2) may be utilized as SREs/DDs in whole or in part. They may be combined or rearranged to create new peptides, proteins, regions or domains of which any may be used as SREs/DDs or the starting point for the design of further SREs and/or DDs.

[0078] In one embodiment, the SRE is derived from a region of a parent protein (e.g., CA2) or from a mutant protein. The region of the parent protein may be 5-50, 25-75, 50-100, 75-125, 100-150, 125-175, 150-200, 175-225, 200-250, 225-275, 250-300, 275-325, 300-350, 325-375, 350-400, 375-425, or 400-450 amino acids in length. As a non-limiting example, the region of the parent protein may be 250-270 amino acids in length. As a non-limiting example, the region of the parent protein may be 225-250 amino acids in length. As a non-limiting example, the region of the parent protein may be 225-260 amino acids in length.

[0079] In one embodiment, the SRE is derived from a parent protein (e.g., CA2) or from a mutant protein and includes a region of the parent protein. The SRE may include a region of the parent protein which is 1%, 5%, 10%, 15%, 20%, 25%, 30%, 35%, 40%, 45%, 50%, 55%, 60%, 65%, 70%, 75%, 80%, 85%, 90%, 95%, 99%, or 100%, 5-10%, 10-15%, 15-20%, 20-25%, 25-30%, 30-35%, 35-40%, 40-45%, 45-50%, 50-55%, 55-60%, 60-65%, 65-70%, 70-75%, 75-80%, 80-85%, 85-90%, 90-95%, 95-100%, 10-20%, 20-30%, 30-40%, 40-50%, 50-60%, 60-70%, 70-80%, 80-90%, 90-100%, 10-30%, 20-40%, 30-50%, 40-60%, 50-70%, 60-80%, 70-90%, 80-100%, 10-40%, 20-50%, 30-60%, 40-70%, 50-80%, 60-90%, 70-100%, 10-50%, 20-60%, 30-70%, 40-80%, 50-90%, 60-100%, 10-60%, 20-70%, 30-80%, 40-90%, 50-100%, 10-70%, 20-80%, 30-90%, 40-100%, 10-80%, 20-90%, 30-100%, 10-90%, 20-100%, 25-50%, 50-75%, or 75-100% of the parent protein or mutant protein.

[0080] In one embodiment, the SRE is derived from a parent protein (e.g., CA2) or from a mutant protein and may have 1%, 5%, 10%, 15%, 20%, 25%, 30%, 35%, 40%, 45%, 50%, 55%, 60%, 65%, 70%, 75%, 80%, 85%, 90%, 95%, 99%, or 100%, 5-10%, 10-15%, 15-20%, 20-25%, 25-30%, 30-35%, 35-40%, 40-45%, 45-50%, 50-55%, 55-60%, 60-65%, 65-70%, 70-75%, 75-80%, 80-85%, 85-90%, 90-95%, 95-100%, 10-20%, 20-30%, 30-40%, 40-50%, 50-60%, 60-70%, 70-80%, 80-90%, 90-100%, 10-30%, 20-40%, 30-50%, 40-60%, 50-70%, 60-80%, 70-90%, 80-100%, 10-40%, 20-50%, 30-60%, 40-70%, 50-80%, 60-90%, 70-100%, 10-50%, 20-60%, 30-70%, 40-80%, 50-90%, 60-100%, 10-60%, 20-70%, 30-80%, 40-90%, 50-100%, 10-70%, 20-80%, 30-90%, 40-100%, 10-80%, 20-90%, 30-100%, 10-90%, 20-100%, 25-50%, 50-75%, or 75-100% identity to the parent protein or mutant protein.

[0081] Candidate destabilizing domain sequence identified from protein domains of parent proteins (as a template) may be mutated to generate libraries of mutants based on the template candidate domain sequence. Mutagenesis strategies used to generate DD libraries may include site-directed mutagenesis e.g. by using structure guided information; or random mutagenesis e.g. using error-prone PCR, or a combination of both. In some embodiments, destabilizing domains identified using random mutagenesis may be used to identify structural properties of the candidate DDs that may be required for destabilization, which may then be used to further generate libraries of mutations using site directed mutagenesis.

[0082] In some embodiments, DD mutant libraries may be screened for mutations with altered, preferably higher binding affinity to the ligand, as compared to the wild type protein. DD libraries may also be screened using two or more ligands and DD mutations that are stabilized by some ligands but not others may be preferentially selected. DD mutations that bind preferentially to the ligand compared to a naturally occurring protein may also be selected. Such methods may be used to optimize ligand selection and ligand binding affinity of the DD. Additionally, such approaches can be used to minimize deleterious effects caused by off-target ligand binding.

[0083] In some embodiments, suitable DDs may be identified by screening mutant libraries using barcodes. Such methods may be used to detect, identify and quantify individual mutant clones within the heterogeneous mutant library. Each DD mutant within the library may have distinct barcode sequences (with respect to each other). In other instances, the polynucleotides can also have different barcode sequences with respect to 2, 3, 4, 5, 6, 7, 8, 9, 10 or more nucleic acid bases. Each DD mutant within the library may also comprise a plurality of barcode sequences. When used in plurality may be used such that each barcode is unique to any other barcode. Alternatively, each barcode used may not be unique, but the combination of barcodes used may create a unique sequence that can be individually tracked. The barcode sequence may be placed upstream of the SRE, downstream of the SRE, or in some instances may be placed within the SRE. DD mutants may be identified by barcodes using sequencing approaches such as Sanger sequencing, and next generation sequencing, but also by polymerase chain reaction and quantitative polymerase chain reaction. In some embodiments, polymerase chain reaction primers that amplify a different size product for each barcode may be used to identify each barcode on an agarose gel. In other instances, each barcode may have a unique quantitative polymerase chain reaction probe sequence that enables targeted amplification of each barcode.

[0084] In one embodiment, the effector modules and/or SREs of the present disclosure may include at least one destabilizing domain (DD). The effector modules and/or SRE may include 1, 2, 3, 4, 5, 6, 7, 8, 9, 10 or more than 10 DDs. When there are more than one DDs, each of the DDs may be derived from the same parent protein, from different parent proteins, may be a fusion of two different parent proteins, or may be artificial.

[0085] In one embodiment, the effector modules and/or SREs of the present disclosure may include 2 DDs. In one embodiment, the effector modules and/or SREs of the present disclosure may include 3 DDs. In one embodiment, the effector modules and/or SREs of the present disclosure may include 4 DDs. In one embodiment, the effector modules and/or SREs of the present disclosure may include 5 DDs. In one embodiment, the effector modules and/or SREs of the present disclosure may include 6 DDs. In one embodiment, the effector modules and/or SREs of the present disclosure may include 7 DDs. In one embodiment, the effector modules and/or SREs of the present disclosure may include 8 DDs. In one embodiment, the effector modules and/or SREs of the present disclosure may include 9 DDs. In one embodiment, the effector modules and/or SREs of the present disclosure may include 10 DDs. The DDs may be derived from any parent protein known in the art and/or described herein. In some embodiments the DDs are derived from the same parent protein. In some embodiments the DDs are derived from different regions of the same parent protein. In some embodiments, the DDs are derived from different parent proteins.

### CA2 Destabilizing Domains

[0086] In some embodiments, the DDs of the present disclosure may be derived from human carbonic anhydrase 2 CA2, which is a member of the Carbonic anhydrases (CAs, EC 4.2.1.1) a superfamily of metalloenzymes present in all life kingdoms. CAs equilibrate the reaction between three chemical species: C02, bicarbonate, and protons. CAs have convergently evolved, with seven genetically distinct CA families that evolved independently in Bacteria, Archaea, and Eukarya, the α-, β-, γ-, δ-, ζ-, η-, and θ-CAs. In some embodiments, the DDs described herein may be derived from at least one parent protein selected from, but not limited to Carbonic Anhydrase 2 (CA2), Carbonic Anhydrase 1 (CA1), Carbonic Anhydrase 3 (CA3), Carbonic Anhydrase 4 (CA4), Carbonic Anhydrase 5A (CA5A), Carbonic Anhydrase 5B (CA5B), Carbonic Anhydrase 6 (CA6), Carbonic Anhydrase 7 (CA7), Carbonic Anhydrase 8 (CA8), Carbonic Anhydrase 9 (CA9), Carbonic Anhydrase 10 (CA10), Carbonic Anhydrase 11 (CA11), Carbonic Anhydrase 12 (CA12), Carbonic Anhydrase 13 (CA13), and Carbonic Anhydrase 14 (CA14).

[0087] In one embodiment, the DDs may be derived from cytosolic CAs such as but not limited to Carbonic Anhydrase 2 (CA2), Carbonic Anhydrase 1 (CA1), Carbonic Anhydrase 3 (CA3), Carbonic Anhydrase 7 (CA7), and Carbonic Anhydrase 13 (CA13). In one embodiment, the DDs may be derived from mitochondrial CAs such as but not limited to Carbonic Anhydrase 5A (CASA), and Carbonic Anhydrase 5B (CA5B). In one embodiment, the DDs may be derived from secreted CAs such as but not limited to Carbonic Anhydrase 6 (CA6). In one embodiment, the DDs may be derived from membrane associated CAs such as but not limited to Carbonic Anhydrase 4 (CA4), Carbonic Anhydrase 9 (CA9), Carbonic Anhydrase 12 (CA12), and Carbonic Anhydrase 14 (CA14). In one embodiment, the DD is derived from CA2. In another aspect, the DD may be derived from CA9.

[0088] In some embodiments, the DDs of the present disclosure may be derived from CA2 (SEQ ID NO. 5810; Uniprot ID: P00918) which may be stabilized by ligands such as small molecule inhibitors of CA2. As used herein the term “CA2 WT”, refers to the human wildtype CA2 protein sequence, which is defined as SEQ ID NO. 5810, with the GenBank Access NO. P00918, having the amino acid sequence:

MSHHWGYGKHNGPEHWHKDFPIAKGERQSPVDIDTHTAKYDPSLKPLSVSY
DQATSLRILNNGHAFNVEFDDSQDKAVLKGGPLDGTYRLIQFHFHWGSLDG
QGSEHTVDKKKYAAELHLVHWNTKYGDFGKAVQQPDGLAVLGIFLKVGSAK
PGLQKVVDVLDSIKTKGKSADFTNFDPRGLLPESLDYWTYPGSLTTPPLLE
CVTWIVLKEPISVSSEQVLKFRKLNFNGEGEPEELMVDNWRPAQPLKNRQI
KASFK.

[0089] In some embodiments, DDs of the present disclosure may be identified by utilizing a cocktail of CA2 inhibitors. In other instances, the suitable DDs may be identified by screening first with one CA2 inhibitor and subsequently screening with a second CA2 inhibitor.

[0090] The amino acid sequences of the destabilizing domains encompassed in the disclosure have at least about 40%, 50 or 60% identity, further at least about 70% identity, preferably at least about 75% or 80% identity, more preferably at least about 85%, 86%, 87%, 88%, 89% or 90% identity, and further preferably at least about 91%, 92%, 93%, 94%, 95%, 96%, 97%, 98% or 99% identity to the amino acid sequence set forth therein. Percent identity may be determined, for example, by comparing sequence information using the advanced BLAST computer program, including version Magic-BLAST 1.2.0, available from the National Institutes of Health. The BLAST program is based on the alignment method discussed in Karl and Altschul (1990) Proc. Natl. Acad. Sci USA, 87:2264-68 (the contents of which are incorporated by reference in their entirety).

[0091] In some embodiments, DDs derived from CA2 may comprise amino acids 2-260 of the parent CA2 sequence. This is referred to herein as an M1del mutation. In one embodiment, DDs derived from CA2 may comprise amino acids 2-237 of the parent CA2 sequence.

[0092] Provided herein in Table 1, Table 2, Table 3, Table 4 and Table 6 are CA2 mutants identified by mutagenesis such as random mutagenesis screening, using a combination of nucleotide analog mutagenesis and error-prone PCR, to generate libraries of mutants; or saturation mutagenesis. CA2 destabilizing mutants may also be identified by structure guided mutagenesis and are provided in Table 1. The position of the mutated amino acids listed in Table 1, Table 2, Table 3, Table 4, Table 5, and Table 6 are relative to the full length CA2 of SEQ ID NO. 5810.

TABLE 1
CA2 DDs

| | | | AA | NA |
|---|---|---|---|---|
| | | | SEQ | SEQ |
| | | | ID | ID |
| Library ID | Description | AA SEQUENCE | NO. | NO. |
| — | CA2 (aa 2-260 | SHHWGYGKHNGPEHWHKDFPIAKGERQSPVDIDTHTAKYDPSLKPLSVSYD | 5651 | 5652 |
| | of WT) | QATSLRILNNGHAFNVEFDDSQDKAVLKGGPLDGTYRLIQFHFHWGSLDGQ | | |
| | | GSEHTVDKKKYAAELHLVHWNTKYGDFGKAVQQPDGLAVLGIFLKVGSAK | | |
| | | PGLQKVVDVLDSIKTKGKSADFTNFDPRGLLPESLDYWTYPGSLTTPPLLEC | | |
| | | VTWIVLKEPISVSSEQVLKFRKLNFNGEGEPEELMVDNWRPAQPLKNRQIKA | | |
| | | SFK | | |
| — | CA2 (aa 2-260 | SHHWGYGKHNGPEHWHKDFPIAKGERQSPVDIDTHTAKYDPSLKPLSVSYD | 5653 | 5654 |
| | of WT, | QATSLRILNNGHAFNVEFDDSQDKAVLKGGPLDGTYRLIQFHFHWGSLDGQ | | |
| | W208S) | GSEHTVDKKKYAAELHLVHWNTKYGDFGKAVQQPDGLAVLGIFLKVGSAK | | |
| | | PGLQKVVDVLDSIKTKGKSADFTNFDPRGLLPESLDYWTYPGSLTTPPLLEC | | |
| | | VTSIVLKEPISVSSEQVLKFRKLNFNGEGEPEELMVDNWRPAQPLKNRQIKA | | |
| | | SFK | | |
| LibC000103 | CA2 (aa 2-260 | SHHWGYGKHNGPEHWHKDFPIAKGERQSPVDIDTHTAKYDPSLKPLSVSND | 5655 | 5656 |
| | of WT, Y51N) | QATSLRILNNGHAFNVEFDDSQDKAVLKGGPLDGTYRLIQFHFHWGSLDGQ | | |
| | | GSEHTVDKKKYAAELHLVHWNTKYGDFGKAVQQPDGLAVLGIFLKVGSAK | | |
| | | PGLQKVVDVLDSIKTKGKSADFTNFDPRGLLPESLDYWTYPGSLTTPPLLEC | | |
| | | VTWIVLKEPISVSSEQVLKFRKLNFNGEGEPEELMVDNWRPAQPLKNRQIKA | | |
| | | SFK | | |
| LibC000101 | CA2 (aa 2-260 | SHHWGYGKHNGPEHWHKDFPIAKGERQSPVDIDTHTAKYDPSLKPLSVSYD | 5657 | 5658 |
| | of WT, S56N) | QATNLRILNNGHAFNVEFDDSQDKAVLKGGPLDGTYRLIQFHFHWGSLDGQ | | |
| | | GSEHTVDKKKYAAELHLVHWNTKYGDFGKAVQQPDGLAVLGIFLKVGSAK | | |
| | | PGLQKVVDVLDSIKTKGKSADFTNFDPRGLLPESLDYWTYPGSLTTPPLLEC | | |
| | | VTWIVLKEPISVSSEQVLKFRKLNFNGEGEPEELMVDNWRPAQPLKNRQIKA | | |
| | | SFK | | |
| LibC000098 | CA2 (aa 2-260 | SHHWGYGKHNGPEHWHKDFPIAKGERQSPVDIDTHTAKYDPSLKPLSVSTD | 5659 | 5660 |
| LibC000097 | of WT, Y51T) | QATSLRILNNGHAFNVEFDDSQDKAVLKGGPLDGTYRLIQFHFHWGSLDGQ | | 5661 |
| | | GSEHTVDKKKYAAELHLVHWNTKYGDFGKAVQQPDGLAVLGIFLKVGSAK | | |
| | | PGLQKVVDVLDSIKTKGKSADFTNFDPRGLLPESLDYWTYPGSLTTPPLLEC | | |
| | | VTWIVLKEPISVSSEQVLKFRKLNFNGEGEPEELMVDNWRPAQPLKNRQIKA | | |
| | | SFK | | |
| LibC000095 | CA2 (aa 2-260 | SHHWGYGKHNGPEHWHKDFPIAKGERQSPVDIDTHTAKYDPSLKPLSVSYD | 5662 | 5663 |
| | of WT, D72F, | QATSLRILNNGHAFNVEFDFSQDKAVLKGGPLDGTYRLIQFHFHWGSLDGQ | | |
| | V241F, | GSEHTVDKKKYAAELHLVHWNTKYGDFGKAVQQPDGLAVLGIFLKVGSAK | | |
| | P249L) | PGLQKVVDVLDSIKTKGKSADFTNFDPRGLLPESLDYWTYPGSLTTPPLLEC | | |
| | | VTWIVLKEPISVSSEQVLKFRKLNFNGEGEPEELMFDNWRPAQLLKNRQIKA | | |
| | | SFK | | |
| LibC000084 | CA2 (aa 2-260 | SHHWGYGKHNGPEHWHKDFPIAKGERQSPVDIDTHTAKYDPSLKPLSVSYD | 5664 | 5665 |
| | of WT, D71F, | QATSLRILNNGHAFNVEFFDSQDKAVLKGGPLDGTYRLIQFHFHWGSLDGQ | | |
| | N231F) | GSEHTVDKKKYAAELHLVHWNTKYGDFGKAVQQPDGLAVLGIFLKVGSAK | | |
| | | PGLQKVVDVLDSIKTKGKSADFTNFDPRGLLPESLDYWTYPGSLTTPPLLEC | | |
| | | VTWIVLKEPISVSSEQVLKFRKLNFFGEGEPEELMVDNWRPAQPLKNRQIKA | | |
| | | SFK | | |
| LibC000079 | CA2 (aa 2-260 | SHHWGYGKHNGPEHWHKDFPIAKGERQSPVDIDTHTAKYDPSLKPLSVSYD | 5666 | 5667 |
| LibC000078 | of WT, S56F) | QATFLRILNNGHAFNVEFDDSQDKAVLKGGPLDGTYRLIQFHFHWGSLDGQ | | 5668 |
| | | GSEHTVDKKKYAAELHLVHWNTKYGDFGKAVQQPDGLAVLGIFLKVGSAK | | |
| | | PGLQKVVDVLDSIKTKGKSADFTNFDPRGLLPESLDYWTYPGSLTTPPLLEC | | |
| | | VTWIVLKEPISVSSEQVLKFRKLNFNGEGEPEELMVDNWRPAQPLKNRQIKA | | |
| | | SFK | | |
| LibC000073 | CA2 (aa 2-260 | SHHWGYGKHNGPEHWHKDFPIAKGERQSPVDIDTHTAKYDPSLKPLSVSYD | 5669 | 5670 |
| | of WT, D71L, | QATSLRILNNGHAFNVEFLDSQDKAVLKGGPLDGNYRLIQFHFHWGSLDGQ | | |
| | T87N, L250R) | GSEHTVDKKKYAAELHLVHWNTKYGDFGKAVQQPDGLAVLGIFLKVGSAK | | |
| | | PGLQKVVDVLDSIKTKGKSADFTNFDPRGLLPESLDYWTYPGSLTTPPLLEC | | |
| | | VTWIVLKEPISVSSEQVLKFRKLNFNGEGEPEELMVDNWRPAQPRKNRQIKA | | |
| | | SFK | | |
| LibC000090 | CA2 (aa 2-260 | SHHWGYGKHNGPEHWHKDFPIAKGERQSPVDIDTHTAKYDPSLKPLSVSYD | 5671 | 5672 |
| | of WT, | QATSLRILNNGHAFNVEFDDSQDKAVLKGGPLDGTYRLIQFHFHWGSLDGQ | | |
| | L183S) | GSEHTVDKKKYAAELHLVHWNTKYGDFGKAVQQPDGLAVLGIFLKVGSAK | | |
| | | PGLQKVVDVLDSIKTKGKSADFTNFDPRGSLPESLDYWTYPGSLTTPPLLEC | | |
| | | VTWIVLKEPISVSSEQVLKFRKLNFNGEGEPEELMVDNWRPAQPLKNRQIKA | | |
| | | SFK | | |
| LibC000076 | CA2 (aa 2-260 | SHHWGYGKHNGPEHWHKDFPIAKGERQSPVDIDTHTAKYDPSLKPLSVSYD | 5673 | 5674 |
| | of WT, A77I, | QATSLRILNNGHAFNVEFDDSQDKIVLKGGPLDGTYRLIQFHFHWGSLDGQ | | |
| | P249F) | GSEHTVDKKKYAAELHLVHWNTKYGDFGKAVQQPDGLAVLGIFLKVGSAK | | |
| | | PGLQKVVDVLDSIKTKGKSADFTNFDPRGLLPESLDYWTYPGSLTTPPLLEC | | |
| | | VTWIVLKEPISVSSEQVLKFRKLNFNGEGEPEELMVDNWRPAQFLKNRQIKA | | |
| | | SFK | | |
| LibC000099 | CA2 (aa 2-260 | SHHWGYGKHNGPEHWHKDFPIAKGERQSPVDIDTHTAKYDPSLKPLSVSYD | 5675 | 5676 |
| | of WT, D71K, | QATSLRILNNGHAFNVEFKDSQDKAVLKGGPLDGTYRLIQFHFHWGSLDGQ | | |
| | P249H) | GSEHTVDKKKYAAELHLVHWNTKYGDFGKAVQQPDGLAVLGIFLKVGSAK | | |
| | | PGLQKVVDVLDSIKTKGKSADFTNFDPRGLLPESLDYWTYPGSLTTPPLLEC | | |
| | | VTWIVLKEPISVSSEQVLKFRKLNFNGEGEPEELMVDNWRPAQHLKNRQIK | | |
| | | ASFK | | |
| LibC000081 | CA2 (aa 2-260 | SHHWGYGKHNGPEHWHKDFPIAKGERQSPVDIDTHTAKYDPSLKPLSVSYD | 5677 | 5678 |
| LibC000065 | of WT, D72F, | QATSLRILNNGHAFNVEFDFSQDKAVLKGGPLDGTYRLIQFHFHWGSLDGQ | | 5679 |
| | P249H) | GSEHTVDKKKYAAELHLVHWNTKYGDFGKAVQQPDGLAVLGIFLKVGSAK | | |
| | | PGLQKVVDVLDSIKTKGKSADFTNFDPRGLLPESLDYWTYPGSLTTPPLLEC | | |
| | | VTWIVLKEPISVSSEQVLKFRKLNFNGEGEPEELMVDNWRPAQFLKNRQIKA | | |
| | | SFK | | |
| LibC000082 | CA2 (aa 2-260 | SHHWGYGKHNGPEHWHKDFPIAKGERQSPVDIDTHTAKYDPSLKPLSVSYD | 5680 | 5681 |
| | of WT, Q53N, | NATSLRILYNGHAFNVEFDDSQDKAVLKGGPLDGTYRLIQFHFHWGSLDGQ | | |
| | N61Y) | GSEHTVDKKKYAAELHLVHWNTKYGDFGKAVQQPDGLAVLGIFLKVGSAK | | |
| | | PGLQKVVDVLDSIKTKGKSADFTNFDPRGLLPESLDYWTYPGSLTTPPLLEC | | |
| | | VTWIVLKEPISVSSEQVLKFRKLNFNGEGEPEELMVDNWRPAQPLKNRQIKA | | |
| | | SFK | | |
| — | CA2 (aa 2-260 | SHHWGYGKHNGPEHWHKDFPIAKGERQSPVDIDTHTAKYDPSLKPLSVSYD | 5682 | 5683 |
| | of WT, | QATSLRILNNGHAFNVEFDDSQDKAVLKGGPLDGTYRLIQFHFHWGSLDGQ | | |
| | E106D, | GSDHTVDKKKYAAELHLVHWNTKYGDFGKAVQQPDGLAVLGIFLKVGSA | | |
| | C205S) | KPGLQKVVDVLDSIKTKGKSADFTNFDPRGLLPESLDYWTYPGSLTTPPLLE | | |
| | | SVTWIVLKEPISVSSEQVLKFRKLNFNGEGEPEELMVDNWRPAQPLKNRQIK | | |
| | | ASFK | | |
| — | CA2 (aa 2-260 | SHHWGYGKHNGPEHWHKDFPIAKGERQSPVDIDTHTAKYDPSLKPLSVSYD | 5684 | 5685 |
| | of WT, | QATSLRILNNGHAFNVEFDDSQDKAVLKGGPLDGTYRLIQFHFHWGSLDGQ | | |
| | C205S, | GSEHTVDKKKYAAELHLVHWNTKYGDFGKAVQQPDGLAVLGIFLKVGSAK | | |
| | W208S) | PGLQKVVDVLDSIKTKGKSADFTNFDPRGLLPESLDYWTYPGSLTTPPLLES | | |
| | | VTSIVLKEPISVSSEQVLKFRKLNFNGEGEPEELMVDNWRPAQPLKNRQIKA | | |
| | | SFK | | |
| — | CA2 (aa 2-260 | SHHWGYGKHNGPEHWHKDFPIAKGERQSPVDIDTHTAKYDPSLKPLSVSYD | 5686 | 5687 |
| | of WT, | QATSLRILNNGHAFNVEFDDSQDKAVLKGGPLDGTYRLIQFHFHWGSLDGQ | | |
| | C205S) | GSEHTVDKKKYAAELHLVHWNTKYGDFGKAVQQPDGLAVLGIFLKVGSAK | | |
| | | PGLQKVVDVLDSIKTKGKSADFTNFDPRGLLPESLDYWTYPGSLTTPPLLES | | |
| | | VTWIVLKEPISVSSEQVLKFRKLNFNGEGEPEELMVDNWRPAQPLKNRQIKA | | |
| | | SFK | | |
| LibC000066 | CA2 (aa 2-260 | SHHWGYGKHNGPEHWHKDFPIAKGERQSPVDIDTHTAKYDPSLKPLSVSYD | 5688 | 5689 |
| LibC000069 | of WT, | QATSLRILNNGHAFNVEFDDSQDKAVLKGGPLDGTYRLIQFHFHWGSLDGQ | | 5690 |
| | Y1931) | GSEHTVDKKKYAAELHLVHWNTKYGDFGKAVQQPDGLAVLGIFLKVGSAK | | |
| | | PGLQKVVDVLDSIKTKGKSADFTNFDPRGLLPESLDYWTIPGSLTTPPLLECV | | |
| | | TWIVLKEPISVSSEQVLKFRKLNFNGEGEPEELMVDNWRPAQPLKNRQIKAS | | |
| | | FK | | |
| LibC000056 | CA2 (aa 2-260 | SHHWGYGKHNGPEHWHKDFPIAKGERQSPVDIDTHTAKYDPSLKPLSVSYD | 5691 | 5692 |
| | of WT, S73N, | QATSLRILNNGHAFNVEFDDNQDKAVLKGGPLDGTYYLIQFHFHWGSLDGQ | | |
| | R89Y) | GSEHTVDKKKYAAELHLVHWNTKYGDFGKAVQQPDGLAVLGIFLKVGSAK | | |
| | | PGLQKVVDVLDSIKTKGKSADFTNFDPRGLLPESLDYWTYPGSLTTPPLLEC | | |
| | | VTWIVLKEPISVSSEQVLKFRKLNFNGEGEPEELMVDNWRPAQPLKNRQIKA | | |
| | | SFK | | |
| LibC000057 | CA2 (aa 2-260 | SHHWGYGKHNGPEHWHKDFPIAKGERQSPVDIDTHTAKYDPSLKPLSVSYD | 5693 | 5694 |
| | of WT, D71K, | QATSLRILNNGHAFNVEFKDSQDKAVLKGGPLDGTYRLIQFHFHWGSLDGQ | | |
| | T192F) | GSEHTVDKKKYAAELHLVHWNTKYGDFGKAVQQPDGLAVLGIFLKVGSAK | | |
| | | PGLQKVVDVLDSIKTKGKSADFTNFDPRGLLPESLDYWFYPGSLTTPPLLEC | | |
| | | VTWIVLKEPISVSSEQVLKFRKLNFNGEGEPEELMVDNWRPAQPLKNRQIKA | | |
| | | SFK | | |
| LibC000061 | CA2 (aa 2-260 | SHHWGYGKHNGPEHWHKDFPIAKGERQSPVDIDTHTAKYDPSLKPLSVSYD | 5695; | 5696 |
| | of WT, | QATSLRILNNGHAFNVEFDDSQDKAVLKGGPLDGTYRLIQFHFHWGSLDGQ | 5811 | |
| | E238*) | GSEHTVDKKKYAAELHLVHWNTKYGDFGKAVQQPDGLAVLGIFLKVGSAK | | |
| | | PGLQKVVDVLDSIKTKGKSADFTNFDPRGLLPESLDYWTYPGSLTTPPLLEC | | |
| | | VTWIVLKEPISVSSEQVLKFRKLNFNGEGEPE*LMVDNWRPAQPLKNRQIKA | | |
| | | SFK | | |
| | CA2 (aa 2-260 | SHHWGYGKHNGPEHWHKDFPIAKGERQSPVDIDTHTAKYDPSLKPLSVSYD | 5697 | 5698 |
| LibC000061 | of WT, | QATSLRILNNGHAFNVEFDDSQDKAVLKGGPLDGTYRLIQFHFHWGSLDGQ | | |
| | G144D) | GSEHTVDKKKYAAELHLVHWNTKYGDFGKAVQQPDGLAVLDIFLKVGSAK | | |
| | | PGLQKVVDVLDSIKTKGKSADFTNFDPRGLLPESLDYWTYPGSLTTPPLLEC | | |
| | | VTWIVLKEPISVSSEQVLKFRKLNFNGEGEPEELMVDNWRPAQPLKNRQIKA | | |
| | | SFK | | |
| LibC000092 | CA2 (aa 2-260 | SHHWGYGKHNGPEHWHKDFPIAKGERQSPVDIDTHTAKYDPSLKPLSVSYD | 5699 | 5700 |
| | of WT, | QATSLRILNNGHAFNVEFDDSQDKAVLKGGPLDGTYRLIQFHFHWGSLDGQ | | |
| | Y193L, | GSEHTVDKKKYAAELHLVHWNTKYGDFGKAVQQPDGLAVLGIFLKVGSAK | | |
| | K260L) | PGLQKVVDVLDSIKTKGKSADFTNFDPRGLLPESLDYWTLPGSLTTPPLLEC | | |
| | | VTWIVLKEPISVSSEQVLKFRKLNFNGEGEPEELMVDNWRPAQPLKNRQIKA | | |
| | | SFL | | |
| LibC000053 | CA2 (aa 2-260 | SHHWGYGKHNGPEHWHKDFPIAKGERQSPVDIDTHTAKYDPSLKPLSVSYD | 5701 | 5702 |
| | of WT, | QATSLRILNNGHAFNVEFDDSQDKAVLKGGPLDGTYRLIQFHFHWGSLDGQ | | |
| | V206M) | GSEHTVDKKKYAAELHLVHWNTKYGDFGKAVQQPDGLAVLGIFLKVGSAK | | |
| | | PGLQKVVDVLDSIKTKGKSADFTNFDPRGLLPESLDYWTYPGSLTTPPLLEC | | |
| | | MTWIVLKEPISVSSEQVLKFRKLNFNGEGEPEELMVDNWRPAQPLKNRQIK | | |
| | | ASFK | | |
| LibC000054 | CA2 (aa 2-260 | SHHWGYGKHNGPEHWHKDFPIAKGERQSPVDIDTHTAKYDPSLKPLSVSYD | 5703 | 5704 |
| | of WT, D71F, | QATSLRILNNGHAFNVEFFDSQDKAVLKGGPLDGTYRLIQFHFHWGSLDGQ | | |
| | V241F, | GSEHTVDKKKYAAELHLVHWNTKYGDFGKAVQQPDGLAVLGIFLKVGSAK | | |
| | P249L) | PGLQKVVDVLDSIKTKGKSADFTNFDPRGLLPESLDYWTYPGSLTTPPLLEC | | |
| | | VTWIVLKEPISVSSEQVLKFRKLNFNGEGEPEELMFDNWRPAQLLKNRQIKA | | |
| | | SFK | | |
| LibC000055 | CA2 (aa 2-260 | SHHWGYGKHNGPEHWHKDFPIAKGERQSPVDIDTHTAKYDPSLKPLSVSYD | 5705 | 5706 |
| | of WT, | QATSLRILNNGHAFNVEFDDSQDKAVLKGGPLDGTYRLIQFHFHWGSLDGQ | | |
| | Y193F) | GSEHTVDKKKYAAELHLVHWNTKYGDFGKAVQQPDGLAVLGIFLKVGSAK | | |
| | | PGLQKVVDVLDSIKTKGKSADFTNFDPRGLLPESLDYWTFPGSLTTPPLLEC | | |
| | | VTWIVLKEPISVSSEQVLKFRKLNFNGEGEPEELMVDNWRPAQPLKNRQIKA | | |
| | | SFK | | |
| LibC000058 | CA2 (aa 2-260 | SHHWGYGKHNGPEHWHKDFPIAKGERQSPVDIDTHTAKYDPSLKPLSVSYD | 5707 | 5708 |
| | of WT, | QATSLRILNNGHAFNVEFDDSQDKAVLKGGPLDGTYRLIQFHFHWGSLDGQ | | |
| | L147F, | GSEHTVDKKKYAAELHLVHWNTKYGDFGKAVQQPDGLAVLGIFFKVGSAK | | |
| | Q248F) | PGLQKVVDVLDSIKTKGKSADFTNFDPRGLLPESLDYWTYPGSLTTPPLLEC | | |
| | | VTWIVLKEPISVSSEQVLKFRKLNFNGEGEPEELMVDNWRPAFPLKNRQIKA | | |
| | | SFK | | |
| LibC000059 | CA2 (aa 2-260 | SHHWGYGKHNGPEHWHKDFPIAKGERQSPVDIDTHTAKYDPSLKPLSVSYI | 5709 | 5710 |
| | of WT, D52I, | QATSLRILNNGHAFNVEFDDSQDKAVLKGGPLDGTYRLIQFHFHWGSLDGQ | | |
| | S258P) | GSEHTVDKKKYAAELHLVHWNTKYGDFGKAVQQPDGLAVLGIFLKVGSAK | | |
| | | PGLQKVVDVLDSIKTKGKSADFTNFDPRGLLPESLDYWTYPGSLTTPPLLEC | | |
| | | VTWIVLKEPISVSSEQVLKFRKLNFNGEGEPEELMVDNWRPAQPLKNRQIKA | | |
| | | PFK | | |
| LibC000060 | CA2 (aa 2-260 | SHHWGYGKHNGPEHWHKDFPIAKGERQSPVDIDTHTAKYDPSLKPLSVSYD | 5711 | 5712 |
| | of WT, D72S, | QATSLRILNNGHAFNVEFDSSQDKAVLKGGPLDGTYRLIQFHFHWGSLDGQ | | |
| | T192N) | GSEHTVDKKKYAAELHLVHWNTKYGDFGKAVQQPDGLAVLGIFLKVGSAK | | |
| | | PGLQKVVDVLDSIKTKGKSADFTNFDPRGLLPESLDYWNYPGSLTTPPLLEC | | |
| | | VTWIVLKEPISVSSEQVLKFRKLNFNGEGEPEELMVDNWRPAQPLKNRQIKA | | |
| | | SFK | | |
| LibC000062 | CA2 (aa 2-260 | SHHWGYGKHNGPEHWHKDFPIAKGERQSPVDIDTHTAKYDPSLKPLSVSYD | 5713 | 5714 |
| | of WT, | QATSLRILNNGHAFNVEFDDSQDKAVLKGGPLDGTYRLIQFHFHWGSLDGQ | | |
| | D179E, | GSEHTVDKKKYAAELHLVHWNTKYGDFGKAVQQPDGLAVLGIFLKVGSAK | | |
| | T192I) | PGLQKVVDVLDSIKTKGKSADFTNFEPRGLLPESLDYWIYPGSLTTPPLLECV | | |
| | | TWIVLKEPISVSSEQVLKFRKLNFNGEGEPEELMVDNWRPAQPLKNRQIKAS | | |
| | | FK | | |
| LibC000063 | CA2 (aa 2-260 | SHHWGYGKHNGPEHWHKDFPIAKGERQSPVDIDTHTAKYDPSLKPLSVSYD | 5715 | 5716 |
| | of WT, | QATSLRILNNGHAFNVEFDDSQDKAVLKGGPLDGTYRLIQFHFHWGSLDGQ | | |
| | Y193L) | GSEHTVDKKKYAAELHLVHWNTKYGDFGKAVQQPDGLAVLGIFLKVGSAK | | |
| | | PGLQKVVDVLDSIKTKGKSADFTNFDPRGLLPESLDYWTLPGSLTTPPLLEC | | |
| | | VTWIVLKEPISVSSEQVLKFRKLNFNGEGEPEELMVDNWRPAQPLKNRQIKA | | |
| | | SFK | | |
| LibC000064 | CA2 (aa 2-260 | SHHWGYGKHNGPEHWHKDFPIAKGERQSPVDIDTHTAKYDPSLKPLSVSYD | 5717 | 5718 |
| | of WT, S56N, | QATNLRILNNGHAFNVEFDDSQDKAVLKGGPLDGTYRLIQFHFHWGSLDGK | | |
| | Q103K) | GSEHTVDKKKYAAELHLVHWNTKYGDFGKAVQQPDGLAVLGIFLKVGSAK | | |
| | | PGLQKVVDVLDSIKTKGKSADFTNFDPRGLLPESLDYWTYPGSLTTPPLLEC | | |
| | | VTWIVLKEPISVSSEQVLKFRKLNFNGEGEPEELMVDNWRPAQPLKNRQIKA | | |
| | | SFK | | |
| LibC000067 | CA2 (aa 2-260 | SHHWGYGKHNGPEHWHKDFPIAKGERQSPVDIDTHTAKYDPSLKPLSVSYD | 5719 | 5720 |
| | of WT, D71Y, | QATSLRILNNGHAFNVEFYDSQDKAVLKGGPLDGTYRLIQFHFHWGSLDGQ | | |
| | Q248L) | GSEHTVDKKKYAAELHLVHWNTKYGDFGKAVQQPDGLAVLGIFLKVGSAK | | |
| | | PGLQKVVDVLDSIKTKGKSADFTNFDPRGLLPESLDYWTYPGSLTTPPLLEC | | |
| | | VTWIVLKEPISVSSEQVLKFRKLNFNGEGEPEELMVDNWRPALPLKNRQIKA | | |
| | | SFK | | |
| LibC000068 | CA2 (aa 2-260 | SHHWGYGKHNGPEHWHKDFPIAKGERQSPVDIDTHTAKYDPSLKPLSVSYD | 5721 | 5722 |
| | of WT, S73N, | QATSLRILNNGHAFNVEFDDNQDKAVLKGGPLDGTYFLIQFHFHWGSLDGQ | | |
| | R89F) | GSEHTVDKKKYAAELHLVHWNTKYGDFGKAVQQPDGLAVLGIFLKVGSAK | | |
| | | PGLQKVVDVLDSIKTKGKSADFTNFDPRGLLPESLDYWTYPGSLTTPPLLEC | | |
| | | VTWIVLKEPISVSSEQVLKFRKLNFNGEGEPEELMVDNWRPAQPLKNRQIKA | | |
| | | SFK | | |
| LibC000070 | CA2 (aa 2-260 | SHHWGYGKHNGPEHWHKDFPIAKGERQSPVDIDTHTAKYDPSLKPLSVSYD | 5723 | 5724 |
| | of WT, D71K, | QATSLRILNNGHAFNVEFKDSQDKAVLKGGPLDGTYRLIQFHFHWGSLDGQ | | |
| | N231L, | GSEHTVDKKKYAAELHLVHWNTKYGDFGKAVQQPDGLAVLGIFLKVGSAK | | |
| | E235G, | PGLQKVVDVLDSIKTKGKSADFTNFDPRGLLPESLDYWTYPGSLTTPPLLEC | | |
| | L239F) | VTWIVLKEPISVSSEQVLKFRKLNFLGEGGPEEFMVDNWRPAQPLKNRQIKA | | |
| | | SFK | | |
| LibC000071 | CA2 (aa 2-260 | SHHWGYGKHNGPEHWHKDFPIAKGERQSPVDIDTHTAKYDPSLKPLSVSYD | 5725 | 5726 |
| | of WT, D71F) | QATSLRILNNGHAFNVEFFDSQDKAVLKGGPLDGTYRLIQFHFHWGSLDGQ | | |
| | | GSEHTVDKKKYAAELHLVHWNTKYGDFGKAVQQPDGLAVLGIFLKVGSAK | | |
| | | PGLQKVVDVLDSIKTKGKSADFTNFDPRGLLPESLDYWTYPGSLTTPPLLEC | | |
| | | VTWIVLKEPISVSSEQVLKFRKLNFNGEGEPEELMVDNWRPAQPLKNRQIKA | | |
| | | SFK | | |
| LibC000072 | CA2 (aa 2-260 | SHHWGYGKHNGPEHWHKDFPIAKGERQSPVDIDTHTAKYDPSLKPLSVSYD | 5727 | 5728 |
| | of WT, D72F, | QATSLRILNNGHAFNVEFDFSQDKAVLKGGPLDGTYRLIQFHFHWGSLDGQ | | |
| | P249I) | GSEHTVDKKKYAAELHLVHWNTKYGDFGKAVQQPDGLAVLGIFLKVGSAK | | |
| | | PGLQKVVDVLDSIKTKGKSADFTNFDPRGLLPESLDYWTYPGSLTTPPLLEC | | |
| | | VTWIVLKEPISVSSEQVLKFRKLNFNGEGEPEELMVDNWRPAQILKNRQIKA | | |
| | | SFK | | |
| LibC000074 | CA2 (aa 2-260 | SHHWGYGKHNGPEHWHKDFPIAKGERQSPVDIDTHTAKYDPSLKPLSVSYD | 5729 | 5730 |
| | of WT, | QATSLRILNNGHAFNVEFDDSQDKAVLKGGPLDGTYRLIQFHFHWGSLDGQ | | |
| | T192N) | GSEHTVDKKKYAAELHLVHWNTKYGDFGKAVQQPDGLAVLGIFLKVGSAK | | |
| | | PGLQKVVDVLDSIKTKGKSADFTNFDPRGLLPESLDYWNYPGSLTTPPLLEC | | |
| | | VTWIVLKEPISVSSEQVLKFRKLNFNGEGEPEELMVDNWRPAQPLKNRQIKA | | |
| | | SFK | | |
| LibC000075 | CA2 (aa 2-260 | SHHWGYGKHNGPEHWHKDFPIAKGERQSPVDIDTHTAKYDPSLKPLSVSYD | 5731 | 5732 |
| | of WT, D72X, | QATSLRILNNGHAFNVEFDXSQDKAVLKGGPLDGTYRLIQFHFHWGSLDGQ | | |
| | V241X, | GSEHTVDKKKYAAELHLVHWNTKYGDFGKAVQQPDGLAVLGIFLKVGSAK | | |
| | P249X) | PGLQKVVDVLDSIKTKGKSADFTNFDPRGLLPESLDYWTYPGSLTTPPLLEC | | |
| | | VTWIVLKEPISVSSEQVLKFRKLNFNGEGEPEELMXDNWRPAQXLKNRQIK | | |
| | | ASFK | | |
| LibC000077 | CA2 (aa 2-260 | SHHWGYGKHNGPEHWHKDFPIAKGERQSPVDIDTHTAKYDPSLKPLSVSYD | 5733 | 5734 |
| | of WT, A54X, | QXTXXRILNNGHAFNVEFDDSQDKAVLKGGPLDGTYRLIQFHFHWGSLDGQ | | |
| | S56X, L57X, | GSEHTVDKKKYAAELHLVHWNTKYGDFGKAVQQPDGLAVLGIFLKVGSAK | | |
| | T192X) | PGLQKVVDVLDSIKTKGKSADFTNFDPRGLLPESLDYWXYPGSLTTPPLLEC | | |
| | | VTWIVLKEPISVSSEQVLKFRKLNFNGEGEPEELMVDNWRPAQPLKNRQIKA | | |
| | | SFK | | |
| LibC000080 | CA2 (aa 2-260 | SHHWGYGKHNGPEHWHKDFPIAKGERQSPVDIDTHTAKYDPSLKPLSVSYD | 5735 | 5736 |
| | of WT, | QATSLRILNNGHAFNVEFDDSQDKAVLKGGPLDGTYRLIQFHFHWGSLDGQ | | |
| | Y193V, | GSEHTVDKKKYAAELHLVHWNTKYGDFGKAVQQPDGLAVLGIFLKVGSAK | | |
| | K260F) | PGLQKVVDVLDSIKTKGKSADFTNFDPRGLLPESLDYWTVPGSLTTPPLLEC | | |
| | | VTWIVLKEPISVSSEQVLKFRKLNFNGEGEPEELMVDNWRPAQPLKNRQIKA | | |
| | | SFF | | |
| LibC000085 | CA2 (aa 2-260 | SHHWGYGKHNGPEHWHKDFPIAKGERQSPVDIDTHTAKYDPSLKPLSVSYD | 5737 | 5738 |
| | of WT, G63D, | QATSLRILNNDHAFNVEFDDSQDKAVLKGGPLDGTYRLIQFHFHWGSLDGQ | | |
| | M240L) | GSEHTVDKKKYAAELHLVHWNTKYGDFGKAVQQPDGLAVLGIFLKVGSAK | | |
| | | PGLQKVVDVLDSIKTKGKSADFTNFDPRGLLPESLDYWTYPGSLTTPPLLEC | | |
| | | VTWIVLKEPISVSSEQVLKFRKLNFNGEGEPEELLVDNWRPAQPLKNRQIKA | | |
| | | SFK | | |
| LibC000086 | CA2 (aa 2-260 | SHHWGYGKHNGPEHWHKDFPIAKGERQSPVDIDTHTAKYDPSLKPLSVSYD | 5739 | 5740 |
| | of WT, | QATSLRILNNGHAFNVEFDDSQDKAVLKGGPLDGTYRLIQFHFHWGSLDGQ | | |
| | V134F, | GSEHTVDKKKYAAELHLVHWNTKYGDFGKAFQQPDGLAVLGIFLKVGSAK | | |
| | L228F) | PGLQKVVDVLDSIKTKGKSADFTNFDPRGLLPESLDYWTYPGSLTTPPLLEC | | |
| | | VTWIVLKEPISVSSEQVLKFRKFNFNGEGEPEELMVDNWRPAQPLKNRQIKA | | |
| | | SFK | | |
| LibC000087 | CA2 (aa 2-260 | SHHWGYGKHNGPEHWHKDFPIAKGERQSPVDIDTHTAKYDPSLKPLSVSYD | 5741 | 5742 |
| | of WT, D71G, | QATSLRILNNGHAFNVEFGDSQDKAVLKGGPLDGTYRLIQFHFHWGSLDGQ | | |
| | N231K) | GSEHTVDKKKYAAELHLVHWNTKYGDFGKAVQQPDGLAVLGIFLKVGSAK | | |
| | | PGLQKVVDVLDSIKTKGKSADFTNFDPRGLLPESLDYWTYPGSLTTPPLLEC | | |
| | | VTWIVLKEPISVSSEQVLKFRKLNFKGEGEPEELMVDNWRPAQPLKNRQIKA | | |
| | | SFK | | |
| LibC000088 | CA2 (aa 2-260 | SHHWGYGKHNGPEHWHKDFPIAKGERQSPVDIDTHTAKYDPSLKPLSVSYD | 5743 | 5744 |
| | of WT, S56F, | QATFLRILNNGHAFNVEFSDSQDKAVLKGGPLDGTYRLIQFHFHWGSLDGQ | | |
| | D71S) | GSEHTVDKKKYAAELHLVHWNTKYGDFGKAVQQPDGLAVLGIFLKVGSAK | | |
| | | PGLQKVVDVLDSIKTKGKSADFTNFDPRGLLPESLDYWTYPGSLTTPPLLEC | | |
| | | VTWIVLKEPISVSSEQVLKFRKLNFNGEGEPEELMVDNWRPAQPLKNRQIKA | | |
| | | SFK | | |
| LibC000089 | CA2 (aa 2-260 | SHHWGYGKHNGPEHWHKDFPIAKGERQSPVDIDTHTAKYDPSLKPLSVSYL | 5745 | 5746 |
| | of WT, D52L, | QATSLRILNNGHAFNVEFDDSQDKAVLKGGPLDGTYRLIQFHFHWGSLDGQ | | |
| | G128R, | GSEHTVDKKKYAAELHLVHWNTKYRDFGKAVQQPDGLAVLGIFLKVGSAK | | |
| | Q248F) | PGLQKVVDVLDSIKTKGKSADFTNFDPRGLLPESLDYWTYPGSLTTPPLLEC | | |
| | | VTWIVLKEPISVSSEQVLKFRKLNFNGEGEPEELMVDNWRPAFPLKNRQIKA | | |
| | | SFK | | |
| LibC000091 | CA2 (aa 2-260 | SHHWGYGKHNGPEHWHKDFPIAKGERQSPVDIDTHTAKYDPSLKPLSVSYD | 5747 | 5748 |
| | of WT, S73X, | QATSLRILNNGHAFNVEFDDXQDKAVLKGGPLDGTYXLIQFHFHWGSLDGQ | | |
| | R89X) | GSEHTVDKKKYAAELHLVHWNTKYGDFGKAVQQPDGLAVLGIFLKVGSAK | | |
| | | PGLQKVVDVLDSIKTKGKSADFTNFDPRGLLPESLDYWTYPGSLTTPPLLEC | | |
| | | VTWIVLKEPISVSSEQVLKFRKLNFNGEGEPEELMVDNWRPAQPLKNRQIKA | | |
| | | SFK | | |
| LibC000093 | CA2 (aa 2-260 | SHHWGYGKHNGPEHWHKDFPIAKGERQSPVDIDTHTAKYDPSLKPLSVSYD | 5749 | 5750 |
| | of WT, | QATSLRILNNGHAFNVEFDDSQDKAVLKGGPLDGTYRLIQFHFHWGSLDGQ | | |
| | Y193X) | GSEHTVDKKKYAAELHLVHWNTKYGDFGKAVQQPDGLAVLGIFLKVGSAK | | |
| | | PGLQKVVDVLDSIKTKGKSADFTNFDPRGLLPESLDYWTXPGSLTTPPLLEC | | |
| | | VTWIVLKEPISVSSEQVLKFRKLNFNGEGEPEELMVDNWRPAQPLKNRQIKA | | |
| | | SFK | | |
| LibC000096 | CA2 (aa 2-260 | SHHWGYGKHNGPEHWHKDFPIAKGERQSPVDIDTHTAKYDPSLKPLSVSXD | 5751 | 5752 |
| | of WT, Y51X, | QATSLRILNNGHAFNVEFDXSQDKAVLKGGPLDGTYRLIQFHFHWGSLDGQ | | |
| | D72X, | GSEHTVDKKKYAAELHLVHWNTKYGDFGKAVQQPDGLAVLGIFLKVGSAK | | |
| | V241X, | PGLQKVVDVLDSIKTKGKSADFTNFDPRGLLPESLDYWTYPGSLTTPPLLEC | | |
| | P249X) | VTWIVLKEPISVSSEQVLKFRKLNFNGEGEPEELMXDNWRPAQXLKNRQIK | | |
| | | ASFK | | |
| LibC000100 | CA2 (aa 2-260 | SHHWGYGKHNGPEHWHKDFPIAKGERQSPVDIDTHTAKYDPSLKPLSVSYD | 5753 | 5754 |
| | of WT, D72I, | QATSLRILNNGHAFNVEFDISQDKAVLKGGPLDGTYRLIQFHFHCGSLDGQG | | |
| | W97C) | SEHTVDKKKYAAELHLVHWNTKYGDFGKAVQQPDGLAVLGIFLKVGSAKP | | |
| | | GLQKVVDVLDSIKTKGKSADFTNFDPRGLLPESLDYWTYPGSLTTPPLLECV | | |
| | | TWIVLKEPISVSSEQVLKFRKLNFNGEGEPEELMVDNWRPAQPLKNRQIKAS | | |
| | | FK | | |
| LibC000102 | CA2 (aa 2-260 | SHHWGYGKHNGPEHWHKDFPIAKGERQSPVDIDTHTAKYDPSLKPLSVSYD | 5755 | 5756 |
| | of WT, D71K, | QATSLRILNNGHAFNVEFKDSQDKAVLKGGPLDGTYRLIQFHFHWGSLDGQ | | |
| | T192F, | GSEHTVDKKKYAAELHLVHWNTKYGDFGKAVQQPDGLAVLGIFLKVGSAK | | |
| | N231F) | PGLQKVVDVLDSIKTKGKSADFTNFDPRGLLPESLDYWFYPGSLTTPPLLEC | | |
| | | VTWIVLKEPISVSSEQVLKFRKLNFFGEGEPEELMVDNWRPAQPLKNRQIKA | | |
| | | SFK | | |
| — | CA2 (aa 2-260 | SHHWGYGKHNGPEHWHKDFPIAKGERQSPVDIDTHTAKYDPSLKPLSVSYD | 5757 | 5758 |
| LibC000210 | of WT, I59N, | QATSLRNLNNGHAFNVEFDDSQDKAVLKGGPLDGTYRLIQFHFHWGSLDR | | 5813 |
| LibC000184 | G102R) | QGSEHTVDKKKYAAELHLVHWNTKYGDFGKAVQQPDGLAVLGIFLKVGSA | | 5814 |
| LibC000187 | | KPGLQKVVDVLDSIKTKGKSADFTNFDPRGLLPESLDYWTYPGSLTTPPLLE | | 5815 |
| | | CVTWIVLKEPISVSSEQVLKFRKLNFNGEGEPEELMVDNWRPAQPLKNRQIK | | |
| | | ASFK | | |
| — | CA2 (aa 2-260 | SHHWGYGKHNGPEHWHKDFPIAKGERQSPVDIDTHTAKYDPSLKPLSVSYD | 5759 | 5760 |
| LibC000208 | of WT, | QATSLRILNNGHAFNVEFDDSQDKAVLKGGPLDGTYRLIQFHFHWGSLDGQ | | 5816 |
| | L156H) | GSEHTVDKKKYAAELHLVHWNTKYGDFGKAVQQPDGLAVLGIFLKVGSAK | | |
| | | PGHQKVVDVLDSIKTKGKSADFTNFDPRGLLPESLDYWTYPGSLTTPPLLEC | | |
| | | VTWIVLKEPISVSSEQVLKFRKLNFNGEGEPEELMVDNWRPAQPLKNRQIKA | | |
| | | SFK | | |
| — | CA2 (L156H) | MSHHWGYGKHNGPEHWHKDFPIAKGERQSPVDIDTHTAKYDPSLKPLSVSY | 5761 | 5762 |
| | | DQATSLRILNNGHAFNVEFDDSQDKAVLKGGPLDGTYRLIQFHFHWGSLDG | | |
| | | QGSEHTVDKKKYAAELHLVHWNTKYGDFGKAVQQPDGLAVLGIFLKVGSA | | |
| | | KPGHQKVVDVLDSIKTKGKSADFTNFDPRGLLPESLDYWTYPGSLTTPPLLE | | |
| | | CVTWIVLKEPISVSSEQVLKFRKLNFNGEGEPEELMVDNWRPAQPLKNRQIK | | |
| | | ASFK | | |
| LibC000061 | CA2 (aa 2-237 | SHHWGYGKHNGPEHWHKDFPIAKGERQSPVDIDTHTAKYDPSLKPLSVSYD | 5695 | 5812 |
| truncated | of WT) | QATSLRILNNGHAFNVEFDDSQDKAVLKGGPLDGTYRLIQFHFHWGSLDGQ | | |
| | | GSEHTVDKKKYAAELHLVHWNTKYGDFGKAVQQPDGLAVLGIFLKVGSAK | | |
| | | PGLQKVVDVLDSIKTKGKSADFTNFDPRGLLPESLDYWTYPGSLTTPPLLEC | | |
| | | VTWIVLKEPISVSSEQVLKFRKLNFNGEGEPE | | |

[0093] Additional CA2 destabilizing domains are provided in Table 2.

TABLE 2
CA2 DDs

| | | | AA | NA |
|---|---|---|---|---|
| | | | SEQ | SEQ |
| | | | ID | ID |
| Library ID | Description | AA SEQUENCE | NO. | NO. |
| LibC000229 | CA2 (aa 2-260 | SHHWGYGKHNGPEHWHKDFPIAKGERQSPVDIDTQTAKYDPTLKPLSVSFD | 5817 | 5818 |
| | of WT, H36Q, | QATSLRILNNGHAFDVEFDDSQDKAVLKGGPLDGTYRLIQFHFHWGSLDGQ | | |
| | S43T, Y51F, | GSEHTVDKKKYAAELHLVHWNTKYGDFWKAVQQPDGLAVLGIFLKVGSA | | |
| | N67D, G131W, | KPGLQKVVDVLDSIKTKGKSADFTNFDPRGLLPESLDYWTYPGSLTTPPLLE | | |
| | R226H) | CVTWIVLKEPISVSSEQVLKFHKLNFNGEGEPEELMVDNWRPAQPLKNRQIK | | |
| | | ASFK | | |
| LibC000228 | CA2 (aa 2-260 | SHHWGYGKHNGPEHWHKDFPIAKGERQSPVDIDTHTAKYDPSLKPLSVSYD | 5819 | 5820 |
| | of WT, F70I, | QATSLRILNNGHAFNVEIDDSQDKAVLKGGPLDGTYRLIQFHFHWGSLDGQ | | |
| | F146V) | GSEHTVDKKKYAAELHLVHWNTKYGDFGKAVQQPDGLAVLGIVLKVGSA | | |
| | | KPGLQKVVDVLDSIKTKGKSADFTNFDPRGLLPESLDYWTYPGSLTTPPLLE | | |
| | | CVTWIVLKEPISVSSEQVLKFRKLNFNGEGEPEELMVDNWRPAQPLKNRQIK | | |
| | | ASFK | | |
| LibC000226 | CA2 (aa 2-260 | SHHWGYGKHNGPEHWHKDFPIAKGELQSPVDIDTHTAKYDPSLKPLSVSYD | 5821 | 5822 |
| | of WT, R27L, | QATSLRILNNGHAFNVEFDDSQDKAVLKGGPLDGIYRLIQFHFHWGSLDGQ | | |
| | T87I, H122Y, | GSEHTVDKKKYAAELHLVYWNTKYGDFGKAVQQPDGLAVLGIFLKVGSA | | |
| | N252D) | KPGLQKVVDVLDSIKTKGKSADFTNFDPRGLLPESLDYWTYPGSLTTPPLLE | | |
| | | CVTWIVLKEPISVSSEQVLKFRKLNFNGEGEPEELMVDNWRPAQPLKDRQIK | | |
| | | ASFK | | |
| LibC000225 | CA2 (aa 2-260 | SHHWGYGKHNGPEHWHKDFPIAKGERQSPVDIDTHTAKYDPSLNPLSVSYD | 5823 | 5824 |
| | of WT, K45N, | QATSLRILNNGHAFNLEFDDSQDKAVLKGGPLDGTYRLIQFHFHWGSLDGQ | | |
| | V68L, H119Y, | GSEHTVDKKKYAAELYLVHWNTKYGDFGKAVQQPDGLAVLGIFLKVGSA | | |
| | K169R, D179E) | KPGLQKVVDVLDSIKTRGKSADFTNFEPRGLLPESLDYWTYPGSLTTPPLLE | | |
| | | CVTWIVLKEPISVSSEQVLKFRKLNFNGEGEPEELMVDNWRPAQPLKNRQIK | | |
| | | ASFK | | |
| LibC000224 | CA2 (aa 2-260 | SHHWGYGKHNGPELWHKDFPIAKGERQSPVDIDTHTAKYDPSLKPLSVSYD | 5825 | 5826 |
| | of WT, H15L, | QVTSLRILNNGHAFNVEFDDSQDKAVLKGGPLDGTYRLIQFHFHWGSLDGQ | | |
| | A54V, K111E, | GSEHTVDEKKYAAELHLVHWNTKYGDFGKAVQQPDGLAVLGIFLKVGSAK | | |
| | E220K, F225I) | PGLQKVVDVLDSIKTKGKSADFTNFDPRGLLPESLDYWTYPGSLTTPPLLEC | | |
| | | VTWIVLKEPISVSSKQVLKIRKLNFNGEGEPEELMVDNWRPAQPLKNRQIKA | | |
| | | SFK | | |
| LibC000221 | CA2 (aa 2-260 | SHHWGYGKHNGSEHWHKDFPIAKGERQSPVDIDTHTAKYDPSLKPLSVSYD | 5827 | 5828 |
| | of WT, P13S, | QATSLRILNNGHAFNVEFDDSQDKAVLKGGALDGTYRLIQFHFHWGSLGGQ | | |
| | P83A, D101G, | GSEHTVDNKKYAAELHLVHWNTKYGDFGKAVQQPDGLAVLGIFLKVGSA | | |
| | K111N, F230I) | KPGLQKVVDVLDSIKTKGKSADFTNFDPRGLLPESLDYWTYPGSLTTPPLLE | | |
| | | CVTWIVLKEPISVSSEQVLKFRKLNINGEGEPEELMVDNWRPAQPLKNRQIK | | |
| | | ASFK | | |
| LibC000220 | CA2 (aa 2-260 | SHHWGYGKHNGPEHWHKDFPIAKGERQSPVDIDTHTAKYDPSLKPRSVSYD | 5829 | 5830 |
| | of WT, L47R) | QATSLRILNNGHAFNVEFDDSQDKAVLKGGPLDGTYRLIQFHFHWGSLDGQ | | |
| | | GSEHTVDKKKYAAELHLVHWNTKYGDFGKAVQQPDGLAVLGIFLKVGSA | | |
| | | KPGLQKVVDVLDSIKTKGKSADFTNFDPRGLLPESLDYWTYPGSLTTPPLLE | | |
| | | CVTWIVLKEPISVSSEQVLKFRKLNFNGEGEPEELMVDNWRPAQPLKNRQIK | | |
| | | ASFK | | |
| LibC000219 | CA2 (aa 2-260 | SHHWGYGKHNGPEHWHKDFPIAKGERQSPVDIDTHTAKYDPSLKPLSVSYD | 5831 | 5832 |
| | of WT, G63D, | QATSLRILNNDHAFNVEFDDSQDKAVLKGGPLDGTYRLIQFHFHWGSLDGQ | | |
| | W123R, E220K) | GSEHTVDKKKYAAELHLVHRNTKYGDFGKAVQQPDGLAVLGIFLKVGSAK | | |
| | | PGLQKVVDVLDSIKTKGKSADFTNFDPRGLLPESLDYWTYPGSLTTPPLLEC | | |
| | | VTWIVLKEPISVSSKQVLKFRKLNFNGEGEPEELMVDNWRPAQPLKNRQIK | | |
| | | ASFK | | |
| LibC000217 | CA2 (aa 2-260 | SHHWGYGKHDGPEHWHKDFPIAKGERQSPVDIDTHTAKYDPSLKPLSVSYD | 5833 | 5834 |
| | of WT, N11D, | QATSLRILNNGHAFNVKFDDSQDKAVLKGGPLDDTYRLIQFHFHWGSLDGQ | | |
| | E69K, G86D, | GSEHTMDKKIYAAELHLVHWNIKYGDFGKAVQQPGGLAVLGIFLKVGSAK | | |
| | V109M, K113I, | PSLQKVVDVLDSIKTKGKSADFTNFDPRGLLPESLDYWTYPGSLTTPPLLEC | | |
| | T1251, D138G, | VTWIVLKEPISVSSEQVLKFRKLNFNGEGEPEELMVDNWRPAQPLKNRQIKA | | |
| | G155S) | SFK | | |
| LibC000214 | CA2 (aa 2-260 | SHHWGYGKHNGPEHWHKDFPIAKGERQSPVDIDTHTAKYDPSLKPLSVSYD | 5835 | 5836 |
| | of WT, I59N, | QATSLRNLNNGHAFNVEFDDSQDKAVLKGGPLDGTYRLIQFHFHWGSLDR | | |
| | G102R, A173T) | QGSEHTVDKKKYAAELHLVHWNTKYGDFGKAVQQPDGLAVLGIFLKVGS | | |
| | | AKPGLQKVVDVLDSIKTKGKSTDFTNFDPRGLLPESLDYWTYPGSLTTPPLL | | |
| | | ECVTWIVLKEPISVSSEQVLKFRKLNFNGEGEPEELMVDNWRPAQPLKNRQI | | |
| | | KASFK | | |
| LibC000213 | CA2 (aa 2-260 | SHHWGYGKHNGPEHWHKDFPIAKGERQSPVDIDTHTAKYDPSLKPLSVSYD | 5837 | 5838 |
| | of WT, L79F, | QATSLRILNNGHAFNVEFDDSQDKAVFKGGPLDGTYRLIQFHFHWGSLDGQ | | |
| | P180S) | GSEHTVDKKKYAAELHLVHWNTKYGDFGKAVQQPDGLAVLGIFLKVGSA | | |
| | | KPGLQKVVDVLDSIKTKGKSADFTNFDSRGLLPESLDYWTYPGSLTTPPLLE | | |
| | | CVTWIVLKEPISVSSEQVLKFRKLNFNGEGEPEELMVDNWRPAQPLKNRQIK | | |
| | | ASFK | | |
| LibC000212 | CA2 (aa 2-260 | SHHWGYGKHNGPEHWHKDFPIAKGERQSPVDIDTHTAKYDPSLKPLSVSYD | 5839 | 5840 |
| | of WT, S73F) | QATSLRILNNGHAFNVEFDDFQDKAVLKGGPLDGTYRLIQFHFHWGSLDGQ | | |
| | | GSEHTVDKKKYAAELHLVHWNTKYGDFGKAVQQPDGLAVLGIFLKVGSA | | |
| | | KPGLQKVVDVLDSIKTKGKSADFTNFDPRGLLPESLDYWTYPGSLTTPPLLE | | |
| | | CVTWIVLKEPISVSSEQVLKFRKLNFNGEGEPEELMVDNWRPAQPLKNRQIK | | |
| | | ASFK | | |
| LibC000211 | CA2 (aa 2-260 | SHHWGYGKHNRPEHWHKDFPIAKGERQSPVDIDTHTAKYDPSLKPLSVSYD | 5841 | 5842 |
| | of WT, G12R) | QATSLRILNNGHAFNVEFDDSQDKAVLKGGPLDGTYRLIQFHFHWGSLDGQ | | |
| | | GSEHTVDKKKYAAELHLVHWNTKYGDFGKAVQQPDGLAVLGIFLKVGSA | | |
| | | KPGLQKVVDVLDSIKTKGKSADFTNFDPRGLLPESLDYWTYPGSLTTPPLLE | | |
| | | CVTWIVLKEPISVSSEQVLKFRKLNFNGEGEPEELMVDNWRPAQPLKNRQIK | | |
| | | ASFK | | |
| LibC000209 | CA2 (aa 2-260 | SHHWGYGKHNGPEHWHKDFPIAKGERQSPVDIDTHTAKYDPSLKPLSVSYD | 5843 | 5844 |
| | of WT, A77P, | QATSLRILNNGHAFNVEFDDSQDKPVLKGGPLDGTYRLIQFHFHWGSLDRQ | | |
| | G102R, D138N) | GSEHTVDKKKYAAELHLVHWNTKYGDFGKAVQQPNGLAVLGIFLKVGSA | | |
| | | KPGLQKVVDVLDSIKTKGKSADFTNFDPRGLLPESLDYWTYPGSLTTPPLLE | | |
| | | CVTWIVLKEPISVSSEQVLKFRKLNFNGEGEPEELMVDNWRPAQPLKNRQIK | | |
| | | ASFK | | |
| LibC000183 | CA2 (aa 2-260 | SHHWGYGKHNGPEHWHKDLPIAKGERQSPVDIDTHTAKYDPSLNPLSVSYD | 5845 | 5846 |
| | of WT, F20L, | QATSLRILNNDHAFNVVFDDSQDKAVLKGGPLDGTYRLIQFHFHWGSLDGQ | | |
| | K45N, G63D, | GSEHTVDKKKYAAELHLVHWNTKYGDFGKAVQQPDGLAVLGIFLKVGSA | | |
| | E69V, N231I) | KPGLQKVVDVLDSIKTKGKSADFTNFDPRGLLPESLDYWTYPGSLTTPPLLE | | |
| | | CVTWIVLKEPISVSSEQVLKFRKLNFIGEGEPEELMVDNWRPAQPLKNRQIK | | |
| | | ASFK | | |
| LibC000207 | CA2 (aa 2-260 | SHHWGYGKHNGPEHWHKDFPIAKGERQSPVDIDTHTAKYDPSLKPLSVSYD | 5847 | 5848 |
| | of WT, T199N, | QATSLRILNNGHAFNVEFDDSQDKAVLKGGPLDGTYRLIQFHFHWGSLDGQ | | |
| | L202P, L228F) | GSEHTVDKKKYAAELHLVHWNTKYGDFGKAVQQPDGLAVLGIFLKVGSA | | |
| | | KPGLQKVVDVLDSIKTKGKSADFTNFDPRGLLPESLDYWTYPGSLTNPPPLE | | |
| | | CVTWIVLKEPISVSSEQVLKFRKFNFNGEGEPEELMVDNWRPAQPLKNRQIK | | |
| | | ASFK | | |
| LibC000206 | CA2 (aa 2-260 | SHHWGYGNHNGPEHWHKDFPIAKGERQSPVDIDTHTAKYDPSLKPLSVSYD | 5849 | 5850 |
| | of WT, K9N, | QATSLRILNNGHAFNVEFDDSQDKAVLKGGPLDGTYRLIQFHFHWGSLDGQ | | |
| | H122Y, T168K) | GSEHTVDKKKYAAELHLVYWNTKYGDFGKAVQQPDGLAVLGIFLKVGSA | | |
| | | KPGLQKVVDVLDSIKKKGKSADFTNFDPRGLLPESLDYWTYPGSLTTPPLLE | | |
| | | CVTWIVLKEPISVSSEQVLKFRKLNFNGEGEPEELMVDNWRPAQPLKNRQIK | | |
| | | ASFK | | |
| LibC000205 | CA2 (aa 2-260 | SHHWGYGKHNGPEHWHKDFPIAKGERQSPVDIDTHTAKYDPSLKPLSVSYD | 5851 | 5852 |
| | of WT, Q53H, | HATSLRILNNGHAFNVEFDDSQDKAVLKGGPLDGTYRVIHFHFHWGSLDGQ | | |
| | L90V, Q92H, | GSEHTVDKKKYAAELHLVHWNTKYGDFEKAVQQPDGLAVLGIFLKVGSAK | | |
| | G131E) | PGLQKVVDVLDSIKTKGKSADFTNFDPRGLLPESLDYWTYPGSLTTPPLLEC | | |
| | | VTWIVLKEPISVSSEQVLKFRKLNFNGEGEPEELMVDNWRPAQPLKNRQIKA | | |
| | | SFK | | |
| LibC000204 | CA2 (aa 2-260 | SHHWGYGKHNGPEHWHKDFPIAKGERQSPVDIDTHTAKYDPSMKPVSVSY | 5853 | 5854 |
| | of WT, L44M, | DQATSLRILNKGHAFNVDFDDSQDKAVLKGGPLDGTYRLIQFHFHWGSLDG | | |
| | L47V, N62K, | QGSEHTVDKKKYAAELHLVHWNTKYGDFGKAVQQPDGLAVLGIFLKVGS | | |
| | E69D) | AKPGLQKVVDVLDSIKTKGKSADFTNFDPRGLLPESLDYWTYPGSLTTPPLL | | |
| | | ECVTWIVLKEPISVSSEQVLKFRKLNFNGEGEPEELMVDNWRPAQPLKNRQI | | |
| | | KASFK | | |
| LibC000203 | CA2 (aa 2-260 | SHHWGYGKHNGPEHWHKDLPIAKGERQSPVDIDTHTAKYDPSLNPLSVSYD | 5855 | 5856 |
| | of WT, F20L, | QATSLRILNNGHAFNVEFDDSQDKAVLKGGPLDGTYRLIQFHFHWGSLDGQ | | |
| | K45N, G104R, | RSEHTVDKKKYAVELHLVHWNTKYGDFGKAVQQPDGLAVLGIFLKVGSA | | |
| | A116V) | KPGLQKVVDVLDSIKTKGKSADFTNFDPRGLLPESLDYWTYPGSLTTPPLLE | | |
| | | CVTWIVLKEPISVSSEQVLKFRKLNFNGEGEPEELMVDNWRPAQPLKNRQIK | | |
| | | ASFK | | |
| LibC000202 | CA2 (aa 2-260 | SHHWGYGKHNGPEHWHKDFPIAKGERQSPVDIDTHTAKYDPSLKPLSVSYD | 5857 | 5858 |
| | of WT, D75V, | QATSLRILNNGHAFNVEFDDSQVKAVLKGGPLDGTYRLIQFHFHWGSLDGQ | | |
| | K169N, F259L) | GSEHTVDKKKYAAELHLVHWNTKYGDFGKAVQQPDGLAVLGIFLKVGSA | | |
| | | KPGLQKVVDVLDSIKTNGKSADFTNFDPRGLLPESLDYWTYPGSLTTPPLLE | | |
| | | CVTWIVLKEPISVSSEQVLKFRKLNFNGEGEPEELMVDNWRPAQPLKNRQIK | | |
| | | ASLK | | |
| LibC000182 | CA2 (aa 2-260 | SHHWGYGKHNGPEHWHKDFPIAKGERQSPVDIDTHTAKYDPSLKPLSVSYD | 5859 | 5860 |
| | of WT, T207S, | QATSLRILNNGHAFNVEFDDSQDKAVLKGGPLDGTYRLIQFHFHWGSLDGQ | | |
| | V222A, N231D) | GSEHTVDKKKYAAELHLVHWNTKYGDFGKAVQQPDGLAVLGIFLKVGSA | | |
| | | KPGLQKVVDVLDSIKTKGKSADFTNFDPRGLLPESLDYWTYPGSLTTPPLLE | | |
| | | CVSWIVLKEPISVSSEQALKFRKLNFDGEGEPEELMVDNWRPAQPLKNRQIK | | |
| | | ASFK | | |
| LibC000201 | CA2 (aa 2-260 | SHHWGYGKHNGPEHWHKDFPIAKGERQSPVDIDTHTAKYDPSLKPLSVSYD | 5861 | 5862 |
| | of WT, I59F, | QATSLRFLNNGHAFNVEFDDSQDKAVLKGGPLDGTYRLIQFHFHWGSLDG | | |
| | V206M, G232R) | QGSEHTVDKKKYAAELHLVHWNTKYGDFGKAVQQPDGLAVLGIFLKVGS | | |
| | | AKPGLQKVVDVLDSIKTKGKSADFTNFDPRGLLPESLDYWTYPGSLTTPPLL | | |
| | | ECMTWIVLKEPISVSSEQVLKFRKLNFNREGEPEELMVDNWRPAQPLKNRQI | | |
| | | KASFK | | |
| LibC000199 | CA2 (aa 2-260 | SHHWGYGKHNGAEHWHKDFPIAKGERQSPVDIDTHTAKYDPSLKPLSVSY | 5863 | 5864 |
| | of WT, Pl3A, | DQATSLRILNNGHAFNVEFDDSQDKAVLKGGPLDGTYRLIQFHFHWGSLDG | | |
| | A133T) | QGSEHTVDKKKYAAELHLVHWNTKYGDFGKTVQQPDGLAVLGIFLKVGSA | | |
| | | KPGLQKVVDVLDSIKTKGKSADFTNFDPRGLLPESLDYWTYPGSLTTPPLLE | | |
| | | CVTWIVLKEPISVSSEQVLKFRKLNFNGEGEPEELMVDNWRPAQPLKNRQIK | | |
| | | ASFK | | |
| LibC000198 | CA2 (aa 2-260 | SHHWGYGKHNGPEHWHKDFPIAKGERQSPVDIDTHTAKYDPSLKPLSVSYD | 5865 | 5866 |
| | of WT, N61R, | QATSLRILRNGHAFNVEFDDSQDKAVLMGGPLDGTYRLIQFHFHWGSLDGQ | | |
| | K80M, K212N, | GSEHTVDKKKYAAELHLVHWNTKYGDFGKAVQQPDGLAVLGIFLKVGSA | | |
| | N231T, L250P) | KPGLQKVVDVLDSIKTKGKSADFTNFDPRGLLPESLDYWTYPGSLTTPPLLE | | |
| | | CVTWIVLNEPISVSSEQVLKFRKLNFTGEGEPEELMVDNWRPAQPPKNRQIK | | |
| | | ASFK | | |
| LibC000196 | CA2 (aa 2-260 | SHHWGYGKHNGPEHWHKDFPIAKGERQSPVDIDTHTAKYDPSLKPLSVSYD | 5867 | 5868 |
| | of WT, G63D, | QATSLRILNNDHAFNVVFDDSQDKAVLKGGPLDGTYRLIQFHFHWGSLDGQ | | |
| | E69V, N231I) | GSEHTVDKKKYAAELHLVHWNTKYGDFGKAVQQPDGLAVLGIFLKVGSA | | |
| | | KPGLQKVVDVLDSIKTKGKSADFTNFDPRGLLPESLDYWTYPGSLTTPPLLE | | |
| | | CVTWIVLKEPISVSSEQVLKFRKLNFIGEGEPEELMVDNWRPAQPLKNRQIK | | |
| | | ASFK | | |
| LibC000181 | CA2 (aa 2-260 | SHHWGYGKHNGPEHWHKDFPIAKGERQSPVDIDTHTAKYDPSLKPLSVSYD | 5869 | 5870 |
| | of WT, I59N, | QATSLRNLNNGHAFNVEFDDSQDKAVLKGGPLDGTYILIQFHFHWGSLDGQ | | |
| | R89I) | GSEHTVDKKKYAAELHLVHWNTKYGDFGKAVQQPDGLAVLGIFLKVGSA | | |
| | | KPGLQKVVDVLDSIKTKGKSADFTNFDPRGLLPESLDYWTYPGSLTTPPLLE | | |
| | | CVTWIVLKEPISVSSEQVLKFRKLNFNGEGEPEELMVDNWRPAQPLKNRQIK | | |
| | | ASFK | | |
| LibC000194 | CA2 (aa 2-260 | SHHWGYGKHNGPEHWHKDFPIAKGERQSPVDIDTHTAKYDPSLKPLSVSYD | 5871 | 5872 |
| | of WT, A65N, | QATSLRILNNGHNFNVEFDDSQDKAVLKGGPLDDTYRLIQFHFHWGSLDGQ | | |
| | G86D, G131R, | GSEHTVDKKKYAAELHLVHWNTKYGDFRKAVQQPDGLAVLGIFLKVGSA | | |
| | G155D, K158N, | KPDLQNVVDALDSIKTKDKSADFTNFDPRGLLPESLDYWTYPGSLTTPPLLE | | |
| | V162A, G170D, | CVTWIVLKEPISVSSEQVLKFRKLNFNGEGELEELMVDNWRPAQPLKNRQIK | | |
| | P236L) | ASFK | | |
| LibC000192 | CA2 (aa 2-260 | SHHWGYGKHNRPEYWHKVFPIAKGERQSPVDIDTHTAKYDPSLKPLSVSYD | 5873 | 5874 |
| | of WT, G12R, | QATSLRILNNGHAFNVEFDDSQDKAVLKGGPLDGTYRLIQFHFHWGSLDGQ | | |
| | H15Y, D19V) | GSEHTVDKKKYAAELHLVHWNTKYGDFGKAVQQPDGLAVLGIFLKVGSA | | |
| | | KPGLQKVVDVLDSIKTKGKSADFTNFDPRGLLPESLDYWTYPGSLTTPPLLE | | |
| | | CVTWIVLKEPISVSSEQVLKFRKLNFNGEGEPEELMVDNWRPAQPLKNRQIK | | |
| | | ASFK | | |
| LibC000193 | CA2 (aa 2-260 | SHHWGYGKHNGPEHWHKDFPIAKGERQSPVDIDTHTAKYDPSLKPLSVSYD | 5875 | 5876 |
| | of WT, L156H, | QATSLRILNNGHAFNVEFDDSQDKAVLKGGPLDGTYRLIQFHFHWGSLDGQ | | |
| | S172C, F178Y, | GSEHTVDKKKYAAELHLVHWNTKYGDFGKAVQQPDGLAVLGIFLKVGSA | | |
| | E186D) | KPGHQKVVDVLDSIKTKGKCADFTNYDPRGLLPDSLDYWTYPGSLTTPPLL | | |
| | | ECVTWIVLKEPISVSSEQVLKFRKLNFNGEGEPEELMVDNWRPAQPLKNRQI | | |
| | | KASFK | | |
| LibC000189 | CA2 (aa 2-260 | SHHWGYGKHNGPEHWHKDFPIAKGERQSPVDIDTHTAKYDPSLKPLSVSYD | 5877 | 5878 |
| | of WT, A65V, | QATSLRILNNGHVFNVEFDDSQDKAVLKGGPLDGTYRLIQFHYHWGSLDGQ | | |
| | F95Y, E106G, | GSGQTVDKKKYAAELHLVHWNTKYGDFGKAVQQPDGLAVLGMFLKVGS | | |
| | H107Q, I145M, | AKPGLQKVVDVLDSIKTKGKSADITNFDPRGLLPESLDYWTYPGSLTTPPLL | | |
| | F175I) | ECVTWIVLKEPISVSSEQVLKFRKLNFNGEGEPEELMVDNWRPAQPLKNRQI | | |
| | | KASFK | | |
| LibC000186 | CA2 (aa 2-260 | SHHWGYGKHNGPEHWHKDFPIAKGERQSPVDIDTHTAKYDPSLKPLSVSYD | 5879 | 5880 |
| | of WT, L 197P) | NQATSLRILNGHAFNVEFDDSQDKAVLKGGPLDGTYRLIQFHFHWGSLDGQ | | |
| | | GSEHTVDKKKYAAELHLVHWNTKYGDFGKAVQQPDGLAVLGIFLKVGSA | | |
| | | KPGLQKVVDVLDSIKTKGKSADFTNFDPRGLLPESLDYWTYPGSPTTPPLLE | | |
| | | CVTWIVLKEPISVSSEQVLKFRKLNFNGEGEPEELMVDNWRPAQPLKNRQIK | | |
| | | ASFK | | |
| — | CA2 (aa 2-260 | SHHWGYGKHNGPEHWHKDFPIAKGERQSPVDIDTHTAKYDPSLKPLSVSYD | 5881 | 5882 |
| | of WT, G63D, | QATSLRILNNDHAFNVVFDDSQDKAVLKGGPLDGTYRLIQFHFHWGSLDGQ | | |
| | E69V, N231I) | GSEHTVDKKKYAAELHLVHWNTKYGDFGKAVQQPDGLAVLGIFLKVGSA | | |
| | | KPGLQKVVDVLDSIKTKGKSADFTNFDPRGLLPESLDYWTYPGSLTTPPLLE | | |
| | | CVTWIVLKEPISVSSEQVLKFRKLNFIGEGEPEELMVDNWRPAQPLKNRQIK | | |
| | | ASFK | | |

[0094] In some embodiments, the CA2 DDs described herein may include any of the sequences provided in Table 3. In Table 3 “*” represents the translation of stop codon. When the amino acid sequence in Table 3 contains one or more stop codons, the “AA SEQ ID NO.” column provides the SEQ ID NO. of the individual components preceding and following the stop codon in the order in which they occur in the amino acid sequence.

TABLE 3
CA2 DDs

| | | | AA | NA |
|---|---|---|---|---|
| | | | SEQ | SEQ |
| | | | ID | ID |
| Library ID | Description | AA SEQUENCE | NO. | NO. |
| LibC000223 | CA2 (aa 2-260 of WT, G12E, A38V, | SHHWGYGKHNEPEHWHKDFPIAKGERQSPVDID | 5883; | 5885 |
| | A65V, G98V, S99H, D101M, G102D, | THTVKYDPSLKPLSVSYDQATSLRILNNGHVFNV | 5884 | |
| | Q103K, G104V, S105Q, E106S, H107I, | EFDDSQDKAVLKGGPLDGTYRLIQFHFHWVHL | | |
| | T108L, V109W, D110I, K112R, K113N, | MDKVQSILWIKRNMLQNFTWFTGTPNMGILGEL | | |
| | Y114M, A115L, A116Q, E117N, L118F, | CSNLMDWPF*VFFLKVGSAKPGQQKVVDALDSI | | |
| | H119T, L120W, V121F, H122T, W123G, | KTKGKSADFTNFDPRGLLPESLDYWTYPGSLTTP | | |
| | N124T, T125P, K126N, Y127M, D129I, | PLLECVTWIVLKEPISVSSEQVLKFRKLNFNGEG | | |
| | F130L, K132E, A133L, V134C, Q1355, | EPEELMVDNWRPAQPLKNRQIKASFK | | |
| | Q136N, P137L, D138M, G139D, L140W, | | | |
| | A141P, V142F, L143*, G144V, 1145F, | | | |
| | L156Q, V162A) | | | |
| LibC000185 | CA2 (aa 2-260 of WT, F20L, K45N, | SHHWGYGKHNGPEHWHKDLPIAKGERQSPVDI | 5886; | 5888 |
| | G104R, A116V, A173G, W191*) | DTHTAKYDPSLNPLSVSYDQATSLRILNNGHAFN | 5887 | |
| | | VEFDDSQDKAVLKGGPLDGTYRLIQFHFHWGSL | | |
| | | DGQRSEHTVDKKKYAVELHLVHWNTKYGDFG | | |
| | | KAVQQPDGLAVLGIFLKVGSAKPGLQKVVDVL | | |
| | | DSIKTKGKSGDFTNFDPRGLLPESLDY*TYPGSLT | | |
| | | TPPLLECVTWIVLKEPISVSSEQVLKFRKLNFNGE | | |
| | | GEPEELMVDNWRPAQPLKNRQIKASFK | | |
| LibC000215 | CA2 (aa 2-260 of WT, H17D, P3OS, | SHHWGYGKHNGPEHWDKDFPIAKGERQSSVDI | 5889; | 5890 |
| | G81V, K132R, S151I, A152D, A173G, | DTHTAKYDPSLKPLSVSYDQATSLRILNNGHAFN | 5887 | |
| | W191*) | VEFDDSQDKAVLKVGPLDGTYRLIQFHFHWGSL | | |
| | | DGQGSEHTVDKKKYAAELHLVHWNTKYGDFG | | |
| | | RAVQQPDGLAVLGIFLKVGIDKPGLQKVVDVLD | | |
| | | SIKTKGKSGDFTNFDPRGLLPESLDY*TYPGSLTT | | |
| | | PPLLECVTWIVLKEPISVSSEQVLKFRKLNFNGEG | | |
| | | EPEELMVDNWRPAQPLKNRQIKASFK | | |
| LibC000191 | CA2 (aa 2-260 of WT, H17D, P3OS, | SHHWGYGKHNGPEHWDKDFPIAKGERQSSVDI | 5889; | 5891 |
| | G81V, K132R, S151I, A152D, A173G, | DTHTAKYDPSLKPLSVSYDQATSLRILNNGHAFN | 5887 | |
| | W191*) | VEFDDSQDKAVLKVGPLDGTYRLIQFHFHWGSL | | |
| | | DGQGSEHTVDKKKYAAELHLVHWNTKYGDFG | | |
| | | RAVQQPDGLAVLGIFLKVGIDKPGLQKVVDVLD | | |
| | | SIKTKGKSGDFTNFDPRGLLPESLDY*TYPGSLTT | | |
| | | PPLLECVTWIVLKEPISVSSEQVLKFRKLNFNGEG | | |
| | | EPEELMVDNWRPAQPLKNRQIKASFK | | |
| LibC000200 | CA2 (aa 2-260 of WT, I59N, L90*, | SHHWGYGKHNGPEHWHKDFPIAKGERQSPVDI | 5892; | 5894 |
| | G102R) | DTHTAKYDPSLKPLSVSYDQATSLRNLNNGHAF | 5893 | |
| | | NVEFDDSQDKAVLKGGPLDGTYR*IQFHFHWGS | | |
| | | LDRQGSEHTVDKKKYAAELHLVHWNTKYGDFG | | |
| | | KAVQQPDGLAVLGIFLKVGSAKPGLQKVVDVL | | |
| | | DSIKTKGKSADFTNFDPRGLLPESLDYWTYPGSL | | |
| | | TTPPLLECVTWIVLKEPISVSSEQVLKFRKLNFNG | | |
| | | EGEPEELMVDNWRPAQPLKNRQIKASFK | | |
| LibC000197 | CA2 (aa 2-260 of WT, T35I, Y114H, | SHHWGYGKHNGPEHWHKDFPIAKGERQSPVDI | 5895; | 5897 |
| | P154L, D161V, P200A, Q221R, F225L, | DIHTAKYDPSLKPLSVSYDQATSLRILNNGHAFN | 5896 | |
| | E233D, W244*) | VEFDDSQDKAVLKGGPLDGTYRLIQFHFHWGSL | | |
| | | DGQGSEHTVDKKKHAAELHLVHWNTKYGDFG | | |
| | | KAVQQPDGLAVLGIFLKVGSAKLGLQKVVVVL | | |
| | | DSIKTKGKSADFTNFDPRGLLPESLDYWTYPGSL | | |
| | | TTAPLLECVTWIVLKEPISVSSERVLKLRKLNFN | | |
| | | GDGEPEELMVDN*RPAQPLKNRQIKASFK | | |
| LibC000195 | CA2 (aa 2-260 of WT, S105L, L140V, | SHHWGYGKHNGPEHWHKDFPIAKGERQSPVDI | 5898; | 5900 |
| | G155C, Y190*) | DTHTAKYDPSLKPLSVSYDQATSLRILNNGHAFN | 5899 | |
| | | VEFDDSQDKAVLKGGPLDGTYRLIQFHFHWGSL | | |
| | | DGQGLEHTVDKKKYAAELHLVHWNTKYGDFG | | |
| | | KAVQQPDGVAVLGIFLKVGSAKPCLQKVVDVL | | |
| | | DSIKTKGKSADFTNFDPRGLLPESLD*WTYPGSL | | |
| | | TTPPLLECVTWIVLKEPISVSSEQVLKFRKLNFNG | | |
| | | EGEPEELMVDNWRPAQPLKNRQIKASFK | | |
| LibC000188 | CA2 (aa 2-260 of WT, T35I, Y114H, | SHHWGYGKHNGPEHWHKDFPIAKGERQSPVDI | 5901; | 5902 |
| | P154L, D161V, P200A, F225L, E233D, | DIHTAKYDPSLKPLSVSYDQATSLRILNNGHAFN | 5896 | |
| | W244*) | VEFDDSQDKAVLKGGPLDGTYRLIQFHFHWGSL | | |
| | | DGQGSEHTVDKKKHAAELHLVHWNTKYGDFG | | |
| | | KAVQQPDGLAVLGIFLKVGSAKLGLQKVVVVL | | |
| | | DSIKTKGKSADFTNFDPRGLLPESLDYWTYPGSL | | |
| | | TTAPLLECVTWIVLKEPISVSSEQVLKLRKLNFN | | |
| | | GDGEPEELMVDN*RPAQPLKNRQIKASFK | | |
| LibC000180 | CA2 (aa 2-260 of WT, K167*, R181H, | SHHWGYGKHNGPEHWHKDFPIAKGERQSPVDI | 5903; | 5906 |
| | E213*, V217L, L228H) | DTHTAKYDPSLKPLSVSYDQATSLRILNNGHAFN | 5904; | |
| | | VEFDDSQDKAVLKGGPLDGTYRLIQFHFHWGSL | 5905 | |
| | | DGQGSEHTVDKKKYAAELHLVHWNTKYGDFG | | |
| | | KAVQQPDGLAVLGIFLKVGSAKPGLQKVVDVL | | |
| | | DSI*TKGKSADFTNFDPHGLLPESLDYWTYPGSL | | |
| | | TTPPLLECVTWIVLK*PISLSSEQVLKFRKHNFNG | | |
| | | EGEPEELMVDNWRPAQPLKNRQIKASFK | | |
| LibC000190 | CA2 (aa 2-259 of WT, K167*, R181H, | SHHWGYGKHNGPEHWHKDFPIAKGERQSPVDI | 5903; | 5913 |
| | P194Q, G195A, S196H, L197*, T198P, | DTHTAKYDPSLKPLSVSYDQATSLRILNNGHAFN | 5907; | |
| | T199P, P200L, P201L, L202F, L203W, | VEFDDSQDKAVLKGGPLDGTYRLIQFHFHWGSL | 5908; | |
| | E204N, C205V, V206*, T207P, W208G, | DGQGSEHTVDKKKYAAELHLVHWNTKYGDFG | 5909; | |
| | I209L, V210C, L211S, K212R, E213N, | KAVQQPDGLAVLGIFLKVGSAKPGLQKVVDVL | 5910; | |
| | I2155, S216A, V217S, 5218A, 5219A, | DSI*TKGKSADFTNFDPHGLLPESLDYWTYQAH* | 5911; | |
| | E2205, Q221R, V222C, L223*, K224N, | PPLLFWNV*PGLCSRNPSASAASRC*NSVNLTSM | 5912 | |
| | F2255, R226V, K227N, N229T, F2305, | GRLNPKN*WWTTGAQLSH*RTGKSKLPS | | |
| | N231M, E233R, G234L, E235N, E237K, | | | |
| | E238N, L239*, M240W, V241W, D242T, | | | |
| | N243T, W244G, R245A, P246Q, A247L, | | | |
| | Q2485, P249H, L250*, K251R, N252T, | | | |
| | R253G, Q254K, 12555, A257L, 5258P, | | | |
| | F259S) | | | |
| LibC000227 | CA2 (aa 2-259 of WT, P13H, E117*, | SHHWGYGKHNGHEHWHKDFPIAKGERQSPVDI | 5914; | 5919 |
| | G150S, LI84F, P185L, E186N, S187P, | DTHTAKYDPSLKPLSVSYDQATSLRILNNGHAFN | 5915; | |
| | L188W, D189I, Y190T, W191G, T192P, | VEFDDSQDKAVLKGGPLDGTYRLIQFHFHWGSL | 5908; | |
| | Y193T, P194Q, G195A, S196H, L197*, | DGQGSEHTVDKKKYAA*LHLVHWNTKYGDFG | 5916; | |
| | T198P, T199P, P200L, P201L, L202F, | KAVQQPDGLAVLGIFLKVSSAKPGLQKVVDVLD | 5917; | |
| | L203W, E204N, C205V, V206*, T207P, | SIKTKGKSADFTNFDPRGLFLNPWITGPTQAH*PP | 5918; | |
| | W208G, I209L, V210C, L211*, K212R, | LLFWNV*PGLC*RNPSASAASRC*NSVNLTSMGR | 5911; | |
| | E213N, I215S, S216A, V217S, S218A, | VNPKN*WWTTGAQLSH*RTGKSKLPS | 5912 | |
| | S219A, E2205, Q221R, V222C, L223*, | | | |
| | K224N, F2255, R226V, K227N, N229T, | | | |
| | F230S, N231M, E233R, G234V, E235N, | | | |
| | E237K, E238N, L239*, M240W, V241W, | | | |
| | D242T, N243T, W244G, R245A, P246Q, | | | |
| | A247L, Q248S, P249H, L250*, K251R, | | | |
| | N252T, R253G, Q254K, I255S, A257L, | | | |
| | S258P, F259S) | | | |
| LibC000218 | CA2 (aa 2-260 of WT, A133T, L147F, | SHHWGYGKHNGPEHWHKDFPIAKGERQSPVDI | 5920; | 5928 |
| | K148E, V149G, G150W, S151Q, A152R, | DTHTAKYDPSLKPLSVSYDQATSLRILNNGHAFN | 5921; | |
| | K153*, P154T, L156P, Q157S, K158E, | VEFDDSQDKAVLKGGPLDGTYRLIQFHFHWGSL | 5922; | |
| | V159S, V160C, D161*, V162C, L163A, | DGQGSEHTVDKKKYAAELHLVHWNTKYGDFG | 5923; | |
| | D164G, S165F, I166H, K167*, T168N, | KTVQQPDGLAVLGIFFEGWQR*TGPSESC*CAGF | LH; | |
| | K171Q, S172E, A173C, D174*, F175L, | H*NKGQEC*LH*LRSSWPPS*IPGLLDLPRLTDHP | 5924; | |
| | T176H, N177*, F178L, D179R, P180S, | SSSGMCDLDCAQGTHQRQQRAGVEIP*T*LQWG | 5925; | |
| | R181S, G182W, L183P, L184P, P185S, | G*TRRTDGGQLAPSSATEEQANQSFLQ | T; | |
| | E186*, S187I, L188P, D189G, Y190L, | | 5926; | |
| | W191L, T192D, Y193L, G195R, S196L, | | 5927 | |
| | L197T, T198D, T199H, P201S, L202S, | | | |
| | L203S, E204G, C205M, V206C, T207D, | | | |
| | W208L, I209D, V210C, L211A, K212Q, | | | |
| | E213G, P214T, I215H, 5216Q, V217R, | | | |
| | S218Q, 5219Q, E220R, Q221A, V222G, | | | |
| | L223V, K224E, F225I, R226P, K227*, | | | |
| | L228T, N229*, F230L, N231Q, G232W, | | | |
| | E233G, E235*, P236T, E237R, E238R, | | | |
| | L239T, M240D, V241G, D242G, N243Q, | | | |
| | W244L, R245A, A247S, Q2485, P249A, | | | |
| | L250T, K251E, N252E, R253Q, Q254A, | | | |
| | I255N, K256Q, A257S, S258F, F259L, | | | |
| | K260Q) | | | |
| LibC000216 | CA2 (aa 2-260 of WT, F2OL, K45N, | SHHWGYGKHNGPEHWHKDLPIAKGERQSPVDI | 5929; | 5931 |
| | G104R, A116V, L147F, K148E, V149G, | DTHTAKYDPSLNPLSVSYDQATSLRILNNGHAFN | 5921; | |
| | G150W, S151Q, A152R, K153*, P154T, | VEFDDSQDKAVLKGGPLDGTYRLIQFHFHWGSL | 5922; | |
| | L156P, Q157S, K158E, V159S, V160C, | DGQRSEHTVDKKKYAVELHLVHWNTKYGDFG | 5923; | |
| | D161*, V162C, L163A, D164G, S165F, | KAVQQPDGLAVLGIFFEGWQR*TGPSESC*CAGF | LH; | |
| | I166H, K167*, T168N, K171Q, S172E, | H*NKGQEC*LH*LRSSWPPS*IPGLLDLPRLTDHP | 5924; | |
| | A173C, D174*, F175L, T176H, N177*, | SSSGMCDLDCAQGTHQRQQRAGIEIP*T*LQWG | 5930; | |
| | F178L, D179R, P180S, R181S, G182W, | G*TRRTDGGQLAPSSATEEQANQSFLQ | T; | |
| | L183P, L184P, P185S, E186*, S187I, | | 5926; | |
| | L188P, D189G, Y190L, W191L, T192D, | | 5927 | |
| | Y193L, G195R, S196L, L197T, T198D, | | | |
| | T199H, P201S, L202S, L203S, E204G, | | | |
| | C205M, V206C, T207D, W208L, I209D, | | | |
| | V210C, L211A, K212Q, E213G, P214T, | | | |
| | I215H, S216Q, V217R, 5218Q, 5219Q, | | | |
| | E220R, Q221A, V222G, L223I, K224E, | | | |
| | F225I, R226P, K227*, L228T, N229*, | | | |
| | F230L, N231Q, G232W, E233G, E235*, | | | |
| | P236T, E237R, E238R, L239T, M240D, | | | |
| | V241G, D242G, N243Q, W244L, R245A, | | | |
| | A2475, Q2485, P249A, L250T, K251E, | | | |
| | N252E, R253Q, Q254A, I255N, K256Q, | | | |
| | A2575, S258F, F259L, K260Q) | | | |
| LibC000222 | CA2 (aa 2-259 of WT, N11K, G12D, | SHHWGYGKHKDLNTGIRTSPLPRESASPLLTSTLI | 5932, | 5940 |
| | P13L, E14N, HIST, W16G, H17I, K18R, | QPSMTLP*SPCLFPMIKQLP*GSSTMVMLSTWSL | 5933, | |
| | D19T, F20S, I22L, A23P, K24R, G25E, | MTLRTKQCSREDPWMALTD*FSFTFTGVHLMDK | 5934, | |
| | E26S, R27A, Q28S, S29P, P30L, V31L, | VQSILWIKRNMLQNFTWFTGTPNMGILGKLCSN | 5935, | |
| | D32T, I33S, D34T, T35L, H36I, T37Q, | LMDWPF*VFF*RLAALNRAFRKLLMCWIPLKQR | VFF, | |
| | A38P, K39S, Y40M, D41T, P42L, S43P, | ARVLTSLTSILVASFVNPWITGPTQAH*PPLLFWN | 5936, | |
| | L44*, K45S, L47C, S48L, V49F, S50P, | V*PGLCSWNPSASAASRC*NYVNLTSMGRVNPK | 5908, | |
| | Y51M, D52I, Q53K, A54Q, T55L, S56P, | N*RWTTGALLSH*RTGKSKLPS | 5937, | |
| | L57*, R58G, I59S, L60S, N61T, N62M, | | 5938, | |
| | G63V, H64M, A65L, F66S, N67T, V68W, | | 5939, | |
| | E69S, F70L, D71M, D72T, S73L, Q74R, | | 5912 | |
| | D75T, A77Q, V78C, L79S, K8OR, G81E, | | | |
| | G82D, L84W, D85M, G86A, T87L, Y88T, | | | |
| | R89D, L90*, I91F, Q92S, H94T, H96T, | | | |
| | W97G, G98V, S99H, D101M, G102D, | | | |
| | Q103K,G104V, S105Q, E106S, H107I, | | | |
| | T108L, V109W, D110I, K112R, K113N, | | | |
| | Y114M, A115L, A116Q, E117N, L118F, | | | |
| | H119T, L120W, V121F, H122T, W123G, | | | |
| | N124T, T125P, K126N, Y127M, D129I, | | | |
| | F130L, A133L, V134C, Q135S, Q136N, | | | |
| | P137L, D138M, G139D, L140W, A141P, | | | |
| | V142F, L143*, G144V, I145F, L147*, | | | |
| | K148R, V149L, G150A, S151A, A152L, | | | |
| | K153N, P154R, G155A, L156F, Q157R, | | | |
| | V159L, V160L, D161M, V162C, L163W, | | | |
| | D164I, S165P, I166L, T168Q, K169R, | | | |
| | G170A, K171R, S172V, A173L, D174T, | | | |
| | F175S, T176L, N177T, F178S, D179I, | | | |
| | P180L, R181V, G182A, L183S, L184F, | | | |
| | P185V, E186N, S187P, L188W, D189I, | | | |
| | Y190T, W191G, T192P, Y193T, P194Q, | | | |
| | G195A, S196H, L197*, T198P, T199P, | | | |
| | P200L, P201L, L202F, L203W, E204N, | | | |
| | C205V, V206*, T207P, W208G, I209L, | | | |
| | V210C, L211S, K212W, E213N, I215S, | | | |
| | S216A, V217S, S218A, S219A, E220S, | | | |
| | Q221R, V222C, L223*, K224N, F225Y, | | | |
| | R226V, K227N, N229T, F230S, N231M, | | | |
| | E233R, G234V, E235N, E237K, E238N, | | | |
| | L239*, M240R, V241W, D242T, N243T, | | | |
| | W244G, R245A, P246L, A247L, Q248S, | | | |
| | P249H, L250*, K251R, N252T, R253G, | | | |
| | Q254K, I255S, A257L, S258P, F259S) | | | |

[0095] Additional CA2 destabilizing domains are provided in Table 4. CA2 destabilizing mutants provided in Table 4 are identified as described above, such as by structure guided mutagenesis or by combining single mutants.

TABLE 4
CA2 DDs

| | | AA SEQ | NA SEQ |
|---|---|---|---|
| Description | AA Sequence | ID NO. | ID NO. |
| CA2(M1del, | SHHWGYGKHNGPEHWHKDFPIAKGERQSPVDIDTHTAKYDPSLKPLSV | 6073 | 6109 |
| E106D)- | SYDQATSLRILNNGHAFNVEFDDSQDKAVLKGGPLDGTYRLIQFHFHW | | |
| variant | GSLDGQGSDHTVDKKKYAAELHLVHWNTKYGDFGKAVQQPDGLAVL | | |
| 1 | GIFLKVGSAKPGLQKVVDVLDSIKTKGKSADFTNFDPRGLLPESLDYWT | | |
| | YPGSLTTPPLLECVTWIVLKEPISVSSEQVLKFRKLNFNGEGEPEELMVD | | |
| | NWRPAQPLKNRQIKASFK | | |
| CA2(M1del, | SHHWGYGKHNGPEHWHKDFPIAKGERQSPVDIDTHTAKYDPSLKPLSV | 6074 | 6110 |
| I59N, G102R)- | SYDQATSLRNLNNGHAFNVEFDDSQDKAVLKGGPLDGTYRLIQFHFHW | | |
| variant | GSLDRQGSEHTVDKKKYAAELHLVHWNTKYGDFGKAVQQPDGLAVL | | |
| 2 | GIFLKVGSAKPGLQKVVDVLDSIKTKGKSADFTNFDPRGLLPESLDYWT | | |
| | YPGSLTTPPLLECVTWIVLKEPISVSSEQVLKFRKLNFNGEGEPEELMVD | | |
| | NWRPAQPLKNRQIKASFK | | |
| CA2(M1del, | SHHWGYGKHNGPEHWHKDFPIAKGERQSPVDIDTHTAKYDPSLKPLSV | 6075 | 6111 |
| L197P)- | SYDQATSLRILNNGHAFNVEFDDSQDKAVLKGGPLDGTYRLIQFHFHW | | |
| variant | GSLDGQGSEHTVDKKKYAAELHLVHWNTKYGDFGKAVQQPDGLAVL | | |
| 1 | GIFLKVGSAKPGLQKVVDVLDSIKTKGKSADFTNFDPRGLLPESLDYWT | | |
| | YPGSPTTPPLLECVTWIVLKEPISVSSEQVLKFRKLNFNGEGEPEELMVD | | |
| | NWRPAQPLKNRQIKASFK | | |
| CA2(M1del, | SHHWGYGKHNGPEHWHKDFPIAKGERQSPVDIDTHTAKYDPSLKPLSV | 6076 | 6112 |
| L156H, S172C, | SYDQATSLRILNNGHAFNVEFDDSQDKAVLKGGPLDGTYRLIQFHFHW | | |
| F178Y, E186D)- | GSLDGQGSEHTVDKKKYAAELHLVHWNTKYGDFGKAVQQPDGLAVL | | |
| variant | GIFLKVGSAKPGHQKVVDVLDSIKTKGKCADFTNYDPRGLLPDSLDYW | | |
| 1 | TYPGSLTTPPLLECVTWIVLKEPISVSSEQVLKFRKLNFNGEGEPEELMV | | |
| | DNWRPAQPLKNRQIKASFK | | |
| CA2(M1del, | SHHWGYGKHNGPEHWHKDFPIAKGERQSPVDIDTHTAKYDPSLKPLSV | 6077 | 6113 |
| L156H)- | SYDQATSLRILNNGHAFNVEFDDSQDKAVLKGGPLDGTYRLIQFHFHW | | |
| variant | GSLDGQGSEHTVDKKKYAAELHLVHWNTKYGDFGKAVQQPDGLAVL | | |
| 2 | GIFLKVGSAKPGHQKVVDVLDSIKTKGKSADFTNFDPRGLLPESLDYWT | | |
| | YPGSLTTPPLLECVTWIVLKEPISVSSEQVLKFRKLNFNGEGEPEELMVD | | |
| | NWRPAQPLKNRQIKASFK | | |
| CA2(M1del, | SHHWGYGKHNGPEHWHKDFPIAKGELQSPVDIDTHTAKYDPSLKPLSV | 6078 | 6114 |
| R27L, T87I, | SYDQATSLRILNNGHAFNVEFDDSQDKAVLKGGPLDGIYRLIQFHFHW | | |
| H122Y, N252D)- | GSLDGQGSEHTVDKKKYAAELHLVYWNTKYGDFGKAVQQPDGLAVL | | |
| variant | GIFLKVGSAKPGLQKVVDVLDSIKTKGKSADFTNFDPRGLLPESLDYWT | | |
| 1 | YPGSLTTPPLLECVTWIVLKEPISVSSEQVLKFRKLNFNGEGEPEELMVD | | |
| | NWRPAQPLKDRQIKASFK | | |
| CA2(I59N)- | SHHWGYGKHNGPEHWHKDFPIAKGERQSPVDIDTHTAKYDPSLKPLSV | 6079 | 6115 |
| variant 1 | SYDQATSLRNLNNGHAFNVEFDDSQDKAVLKGGPLDGTYRLIQFHFHW | | |
| | GSLDGQGSEHTVDKKKYAAELHLVHWNTKYGDFGKAVQQPDGLAVL | | |
| | GIFLKVGSAKPGLQKVVDVLDSIKTKGKSADFTNFDPRGLLPESLDYWT | | |
| | YPGSLTTPPLLECVTWIVLKEPISVSSEQVLKFRKLNFNGEGEPEELMVD | | |
| | NWRPAQPLKNRQIKASFK | | |
| CA2(063D)- | SHHWGYGKHNGPEHWHKDFPIAKGERQSPVDIDTHTAKYDPSLKPLSV | 6080 | 6116 |
| variant 1 | SYDQATSLRILNNDHAFNVEFDDSQDKAVLKGGPLDGTYRLIQFHFHW | | |
| | GSLDGQGSEHTVDKKKYAAELHLVHWNTKYGDFGKAVQQPDGLAVL | | |
| | GIFLKVGSAKPGLQKVVDVLDSIKTKGKSADFTNFDPRGLLPESLDYWT | | |
| | YPGSLTTPPLLECVTWIVLKEPISVSSEQVLKFRKLNFNGEGEPEELMVD | | |
| | NWRPAQPLKNRQIKASFK | | |
| CA2(M1del, | SHHWGYGKHNGPEHWHKDFPIAKGERQSPVDIDTHTAKYDPSLKPLSV | 6081 | 6117 |
| H122Y)- | SYDQATSLRILNNGHAFNVEFDDSQDKAVLKGGPLDGTYRLIQFHFHW | | |
| variant 1 | GSLDGQGSEHTVDKKKYAAELHLVYWNTKYGDFGKAVQQPDGLAVL | | |
| | GIFLKVGSAKPGLQKVVDVLDSIKTKGKSADFTNFDPRGLLPESLDYWT | | |
| | YPGSLTTPPLLECVTWIVLKEPISVSSEQVLKFRKLNFNGEGEPEELMVD | | |
| | NWRPAQPLKNRQIKASFK | | |
| CA2(M1del, | SHHWGYGKHNGPEHWHKDFPIAKGERQSPVDIDTHTAKYDPSLKPLSV | 6082 | 6118 |
| G63D, M240L)- | SYDQATSLRILNNDHAFNVEFDDSQDKAVLKGGPLDGTYRLIQFHFHW | | |
| variant 1 | G SLDGQGSEHTVDKKKYAAELHLVHWNTKYGDFGKAVQQPDGLAVL | | |
| | GIFLKVGSAKPGLQKVVDVLDSIKTKGKSADFTNFDPRGLLPESLDYWT | | |
| | YPGSLTTPPLLECVTWIVLKEPISVSSEQVLKFRKLNFNGEGEPEELLVD | | |
| | NWRPAQPLKNRQIKASFK | | |
| CA2(M1del, | SHHWGYGKHNGPEHWHKDFPIAKGERQSPVDIDTHTAKYDPSLKPLSV | 6083 | 6119 |
| A77I, P249F)- | SYDQATSLRILNNGHAFNVEFDDSQDKIVLKGGPLDGTYRLIQFHFHWG | | |
| variant 1 | SLDGQGSEHTVDKKKYAAELHLVHWNTKYGDFGKAVQQPDGLAVLGI | | |
| | FLKVGSAKPGLQKVVDVLDSIKTKGKSADFTNFDPRGLLPESLDYWTY | | |
| | PGSLTTPPLLECVTWIVLKEPISVSSEQVLKFRKLNFNGEGEPEELMVDN | | |
| | WRPAQFLKNRQIKASFK | | |
| CA2(M1del, | SHHWGYGKHNGPEHWHKDFPIAKGERQSPVDIDTHTAKYDPSLKPLSV | 6084 | 6120 |
| D71K, T192F)- | SYDQATSLRILNNGHAFNVEFKDSQDKAVLKGGPLDGTYRLIQFHFHW | | |
| variant 1 | GSLDGQGSEHTVDKKKYAAELHLVHWNTKYGDFGKAVQQPDGLAVL | | |
| | GIFLKVGSAKPGLQKVVDVLDSIKTKGKSADFTNFDPRGLLPESLDYWF | | |
| | YPGSLTTPPLLECVTWIVLKEPISVSSEQVLKFRKLNFNGEGEPEELMVD | | |
| | NWRPAQPLKNRQIKASFK | | |
| CA2(M1del, | SHHWGYGKHNGPEHWHKDFPIAKGERQSPVDIDTHTAKYDPSLKPLSV | 6085 | 6121 |
| L156H) | SYDQATSLRILNNGHAFNVEFDDSQDKAVLKGGPLDGTYRLIQFHFHW | | |
| | GSLDGQGSEHTVDKKKYAAELHLVHWNTKYGDFGKAVQQPDGLAVL | | |
| | GIFLKVGSAKPGHQKVVDVLDSIKTKGKSADFTNFDPRGLLPESLDYWT | | |
| | YPGSLTTPPLLECVTWIVLKEPISVSSEQVLKFRKLNFNGEGEPEELMVD | | |
| | NWRPAQPLKNRQIKASFK | | |
| CA2(M1del, | SHHWGYGKHNGPEHWHKDFPIAKGELQSPVDIDTHTAKYDPSLKPLSV | 6086 | 6122 |
| R27L, H122Y)- | SYDQATSLRILNNGHAFNVEFDDSQDKAVLKGGPLDGTYRLIQFHFHW | | |
| variant 1 | GSLDGQGSEHTVDKKKYAAELHLVYWNTKYGDFGKAVQQPDGLAVL | | |
| | GIFLKVGSAKPGLQKVVDVLDSIKTKGKSADFTNFDPRGLLPESLDYWT | | |
| | YPGSLTTPPLLECVTWIVLKEPISVSSEQVLKFRKLNFNGEGEPEELMVD | | |
| | NWRPAQPLKNRQIKASFK | | |
| CA2(M1del, | SHHWGYGKHNGPEHWHKDFPIAKGERQSPVDIDTHTAKYDPSLKPLSV | 6087 | 6123 |
| T87I, H122Y)- | SYDQATSLRILNNGHAFNVEFDDSQDKAVLKGGPLDGIYRLIQFHFHW | | |
| variant 1 | GSLDGQGSEHTVDKKKYAAELHLVYWNTKYGDFGKAVQQPDGLAVL | | |
| | GIFLKVGSAKPGLQKVVDVLDSIKTKGKSADFTNFDPRGLLPESLDYWT | | |
| | YPGSLTTPPLLECVTWIVLKEPISVSSEQVLKFRKLNFNGEGEPEELMVD | | |
| | NWRPAQPLKNRQIKASFK | | |
| CA2(M1del, | SHHWGYGKHNGPEHWHKDFPIAKGERQSPVDIDTHTAKYDPSLKPLSV | 6088 | 6124 |
| H122Y, N252D)- | SYDQATSLRILNNGHAFNVEFDDSQDKAVLKGGPLDGTYRLIQFHFHW | | |
| variant 1 | GSLDGQGSEHTVDKKKYAAELHLVYWNTKYGDFGKAVQQPDGLAVL | | |
| | GIFLKVGSAKPGLQKVVDVLDSIKTKGKSADFTNFDPRGLLPESLDYWT | | |
| | YPGSLTTPPLLECVTWIVLKEPISVSSEQVLKFRKLNFNGEGEPEELMVD | | |
| | NWRPAQPLKDRQIKASFK | | |
| CA2(M1del, | SHHWGYGKHNGPEHWHKDFPIAKGERQSPVDIDTHTAKYDPSLKPLSV | 6089 | 6125 |
| D72F, V241F)- | SYDQATSLRILNNGHAFNVEFDFSQDKAVLKGGPLDGTYRLIQFHFHW | | |
| variant 1 | GSLDGQGSEHTVDKKKYAAELHLVHWNTKYGDFGKAVQQPDGLAVL | | |
| | GIFLKVGSAKPGLQKVVDVLDSIKTKGKSADFTNFDPRGLLPESLDYWT | | |
| | YPGSLTTPPLLECVTWIVLKEPISVSSEQVLKFRKLNFNGEGEPEELMFD | | |
| | NWRPAQPLKNRQIKASFK | | |
| CA2(M1del, | SHHWGYGKHNGPEHWHKDFPIAKGERQSPVDIDTHTAKYDPSLKPLSV | 6090 | 6126 |
| V241F, P249L)- | SYDQATSLRILNNGHAFNVEFDDSQDKAVLKGGPLDGTYRLIQFHFHW | | |
| variant 1 | GSLDGQGSEHTVDKKKYAAELHLVHWNTKYGDFGKAVQQPDGLAVL | | |
| | GIFLKVGSAKPGLQKVVDVLDSIKTKGKSADFTNFDPRGLLPESLDYWT | | |
| | YPGSLTTPPLLECVTWIVLKEPISVSSEQVLKFRKLNFNGEGEPEELMFD | | |
| | NWRPAQLLKNRQIKASFK | | |
| CA2(M1del, | SHHWGYGKHNGPEHWHKDFPIAKGERQSPVDIDTHTAKYDPSLKPLSV | 6091 | 6127 |
| D72F, P249L)- | SYDQATSLRILNNGHAFNVEFDFSQDKAVLKGGPLDGTYRLIQFHFHW | | |
| variant 1 | SLDGQGSEHTVDKKKYAAELHLVHWNTKYGDFGKAVQQPDGLAVL | | |
| | GIFLKVGSAKPGLQKVVDVLDSIKTKGKSADFTNFDPRGLLPESLDYWT | | |
| | YPGSLTTPPLLECVTWIVLKEPISVSSEQVLKFRKLNFNGEGEPEELMVD | | |
| | NWRPAQLLKNRQIKASFK | | |
| CA2(M1del, | SHHWGYGKHNGPEHWHKDFPIAKGERQSPVDIDTHTAKYDPSLKPLSV | 6092 | 6128 |
| D71L, T87N)- | SYDQATSLRILNNGHAFNVEFLDSQDKAVLKGGPLDGNYRLIQFHFHW | | |
| variant 1 | GSLDGQGSEHTVDKKKYAAELHLVHWNTKYGDFGKAVQQPDGLAVL | | |
| | GIFLKVGSAKPGLQKVVDVLDSIKTKGKSADFTNFDPRGLLPESLDYWT | | |
| | YPGSLTTPPLLECVTWIVLKEPISVSSEQVLKFRKLNFNGEGEPEELMVD | | |
| | NWRPAQPLKNRQIKASFK | | |
| CA2(M1del, | SHHWGYGKHNGPEHWHKDFPIAKGERQSPVDIDTHTAKYDPSLKPLSV | 6093 | 6129 |
| D71L, L250R)- | SYDQATSLRILNNGHAFNVEFLDSQDKAVLKGGPLDGTYRLIQFHFHW | | |
| variant 1 | GSLDGQGSEHTVDKKKYAAELHLVHWNTKYGDFGKAVQQPDGLAVL | | |
| | GIFLKVGSAKPGLQKVVDVLDSIKTKGKSADFTNFDPRGLLPESLDYWT | | |
| | YPGSLTTPPLLECVTWIVLKEPISVSSEQVLKFRKLNFNGEGEPEELMVD | | |
| | NWRPAQPRKNRQIKASFK | | |
| CA2(Y51T)- | SHHWGYGKHNGPEHWHKDFPIAKGERQSPVDIDTHTAKYDPSLKPLSV | 6094 | 6130 |
| variant 1 | STDQATSLRILNNGHAFNVEFDDSQDKAVLKGGPLDGTYRLIQFHFHW | | |
| | GSLDGQGSEHTVDKKKYAAELHLVHWNTKYGDFGKAVQQPDGLAVL | | |
| | GIFLKVGSAKPGLQKVVDVLDSIKTKGKSADFTNFDPRGLLPESLDYWT | | |
| | YPGSLTTPPLLECVTWIVLKEPISVSSEQVLKFRKLNFNGEGEPEELMVD | | |
| | NWRPAQPLKNRQIKASFK | | |
| CA2(S73N, | SHHWGYGKHNGPEHWHKDFPIAKGERQSPVDIDTHTAKYDPSLKPLSV | 6095 | 6131 |
| R89F)- | SYDQATSLRILNNGHAFNVEFDDNQDKAVLKGGPLDGTYFLIQFHFHW | | |
| variant 1 | GSLDGQGSEHTVDKKKYAAELHLVHWNTKYGDFGKAVQQPDGLAVL | | |
| | GIFLKVGSAKPGLQKVVDVLDSIKTKGKSADFTNFDPRGLLPESLDYWT | | |
| | YPGSLTTPPLLECVTWIVLKEPISVSSEQVLKFRKLNFNGEGEPEELMVD | | |
| | NWRPAQPLKNRQIKASFK | | |
| CA2(D72F, | SHHWGYGKHNGPEHWHKDFPIAKGERQSPVDIDTHTAKYDPSLKPLSV | 6096 | 6132 |
| P249F)- | SYDQATSLRILNNGHAFNVEFDFSQDKAVLKGGPLDGTYRLIQFHFHW | | |
| variant 1 | GSLDGQGSEHTVDKKKYAAELHLVHWNTKYGDFGKAVQQPDGLAVL | | |
| | GIFLKVGSAKPGLQKVVDVLDSIKTKGKSADFTNFDPRGLLPESLDYWT | | |
| | YPGSLTTPPLLECVTWIVLKEPISVSSEQVLKFRKLNFNGEGEPEELMVD | | |
| | NWRPAQFLKNRQIKASFK | | |
| CA2(T55K, | SHHWGYGKHNGPEHWHKDFPIAKGERQSPVDIDTHTAKYDPSLKPLSV | 6097 | 6133 |
| G63N, Q248N)- | SYDQAKSLRILNNNHAFNVEFDDSQDKAVLKGGPLDGTYRLIQFHFHW | | |
| variant 1 | GSLDGQGSEHTVDKKKYAAELHLVHWNTKYGDFGKAVQQPDGLAVL | | |
| | GIFLKVGSAKPGLQKVVDVLDSIKTKGKSADFTNFDPRGLLPESLDYWT | | |
| | YPG SLTTPPLLECVTWIVLKEPISVSSEQVLKFRKLNFNGEGEPEELMVD | | |
| | NWRPANPLKNRQIKASFK | | |
| CA2(Y1931)- | SHHWGYGKHNGPEHWHKDFPIAKGERQSPVDIDTHTAKYDPSLKPLSV | 6098 | 6134 |
| variant 1 | SYDQATSLRILNNGHAFNVEFDDSQDKAVLKGGPLDGTYRLIQFHFHW | | |
| | GSLDGQGSEHTVDKKKYAAELHLVHWNTKYGDFGKAVQQPDGLAVL | | |
| | GIFLKVGSAKPGLQKVVDVLDSIKTKGKSADFTNFDPRGLLPESLDYWT | | |
| | IPGSLTTPPLLECVTWIVLKEPISVSSEQVLKFRKLNFNGEGEPEELMVD | | |
| | NWRPAQPLKNRQIKASFK | | |
| CA2(S56F)- | SHHWGYGKHNGPEHWHKDFPIAKGERQSPVDIDTHTAKYDPSLKPLSV | 6099 | 6135 |
| variant 1 | SYDQATFLRILNNGHAFNVEFDDSQDKAVLKGGPLDGTYRLIQFHFHW | | |
| | GSLDGQGSEHTVDKKKYAAELHLVHWNTKYGDFGKAVQQPDGLAVL | | |
| | GIFLKVGSAKPGLQKVVDVLDSIKTKGKSADFTNFDPRGLLPESLDYWT | | |
| | YPGSLTTPPLLECVTWIVLKEPISVSSEQVLKFRKLNFNGEGEPEELMVD | | |
| | NWRPAQPLKNRQIKASFK | | |
| CA2(S56F, | SHHWGYGKHNGPEHWHKDFPIAKGERQSPVDIDTHTAKYDPSLKPLSV | 6100 | 6136 |
| D71S)- | SYDQATFLRILNNGHAFNVEFSDSQDKAVLKGGPLDGTYRLIQFHFHW | | |
| variant 1 | GSLDGQGSEHTVDKKKYAAELHLVHWNTKYGDFGKAVQQPDGLAVL | | |
| | GIFLKVGSAKPGLQKVVDVLDSIKTKGKSADFTNFDPRGLLPESLDYWT | | |
| | YPGSLTTPPLLECVTWIVLKEPISVSSEQVLKFRKLNFNGEGEPEELMVD | | |
| | NWRPAQPLKNRQIKASFK | | |
| CA2(S73N, | SHHWGYGKHNGPEHWHKDFPIAKGERQSPVDIDTHTAKYDPSLKPLSV | 6101 | 6137 |
| R89Y)- | SYDQATSLRILNNGHAFNVEFDDNQDKAVLKGGPLDGTYYLIQFHFHW | | |
| variant 1 | GSLDGQGSEHTVDKKKYAAELHLVHWNTKYGDFGKAVQQPDGLAVL | | |
| | GIFLKVGSAKPGLQKVVDVLDSIKTKGKSADFTNFDPRGLLPESLDYWT | | |
| | YPGSLTTPPLLECVTWIVLKEPISVSSEQVLKFRKLNFNGEGEPEELMVD | | |
| | NWRPAQPLKNRQIKASFK | | |
| CA2(V134F, | SHHWGYGKHNGPEHWHKDFPIAKGERQSPVDIDTHTAKYDPSLKPLSV | 6102 | 6138 |
| L228F)- | SYDQATSLRILNNGHAFNVEFDDSQDKAVLKGGPLDGTYRLIQFHFHW | | |
| variant 1 | GSLDGQGSEHTVDKKKYAAELHLVHWNTKYGDFGKAFQQPDGLAVL | | |
| | GIFLKVGSAKPGLQKVVDVLDSIKTKGKSADFTNFDPRGLLPESLDYWT | | |
| | YPGSLTTPPLLECVTWIVLKEPISVSSEQVLKFRKFNFNGEGEPEELMVD | | |
| | NWRPAQPLKNRQIKASFK | | |
| CA2(M1del, | SHHWGYGKHNGPEHWHKDFPIAKGERQSPVDIDTHTAKYDPSLKPLSV | 6103 | 6139 |
| L156H, | SYDQATSLRILNNGHAFNVEFDDSQDKAVLKGGPLDGTYRLIQFHFHW | | |
| A256del, | GSLDGQGSEHTVDKKKYAAELHLVHWNTKYGDFGKAVQQPDGLAVL | | |
| S257del, | GIFLKVG SAKPGHQKVVDVLDSIKTKGKSADFTNFDPRGLLPESLDYWT | | |
| F258del, | YPGSLTTPPLLECVTWIVLKEPISVSSEQVLKFRKLNFNGEGEPEELMVD | | |
| K259del)- | NWRPAQPLKNRQIK | | |
| variant 1 | | | |
| CA2(M1del, | GYGKHNGPEHWHKDFPIAKGERQSPVDIDTHTAKYDPSLKPLSVSYDQ | 6104 | 6140 |
| S2del, H3del, | ATSLRILNNGHAFNVEFDDSQDKAVLKGGPLDGTYRLIQFHFHWGSLD | | |
| H4del, W5del, | GQGSEHTVDKKKYAAELHLVHWNTKYGDFGKAVQQPDGLAVLGIFLK | | |
| L156H)- | VGSAKPGHQKVVDVLDSIKTKGKSADFTNFDPRGLLPESLDYWTYPGS | | |
| variant 1 | LTTPPLLECVTWIVLKEPISVSSEQVLKFRKLNFNGEGEPEELMVDNWR | | |
| | PAQPLKNRQIKASFK | | |
| CA2(M1del, | SHHYGYGKHNGPEHWHKDFPIAKGERQSPVDIDTHTAKYDPSLKPLSV | 6105 | 6141 |
| W5Y, L156H)- | SYDQATSLRILNNGHAFNVEFDDSQDKAVLKGGPLDGTYRLIQFHFHW | | |
| variant 1 | GSLDGQGSEHTVDKKKYAAELHLVHWNTKYGDFGKAVQQPDGLAVL | | |
| | GIFLKVGSAKPGHQKVVDVLDSIKTKGKSADFTNFDPRGLLPESLDYWT | | |
| | YPGSLTTPPLLECVTWIVLKEPISVSSEQVLKFRKLNFNGEGEPEELMVD | | |
| | NWRPAQPLKNRQIKASFK | | |
| CA2(M1del, | SHHWGYGKHNGPEHWHKDFPIAKGERQSPVDIDTHTAKYDPSLKPLSV | 6106 | 6142 |
| L156H, | SYDQATSLRILNNGHAFNVEFDDSQDKAVLKGGPLDGTYRLIQFHFHW | | |
| 0234del, | GSLDGQGSEHTVDKKKYAAELHLVHWNTKYGDFGKAVQQPDGLAVL | | |
| E235del, | GIFLKVGSAKPGHQKVVDVLDSIKTKGKSADFTNFDPRGLLPESLDYWT | | |
| P236del)- | YPGSLTTPPLLECVTWIVLKEPISVSSEQVLKFRKLNFNGEEELMVDNW | | |
| variant 1 | RPAQPLKNRQIKASFK | | |
| CA2(M1del, | SHHWGYGKHNGPEHWHKDFPIAKGERQSPVDIDTHTAKYDPSLKPLSV | 6107 | 6143 |
| L156H, F225L)- | SYDQATSLRILNNGHAFNVEFDDSQDKAVLKGGPLDGTYRLIQFHFHW | | |
| variant 1 | GSLDGQGSEHTVDKKKYAAELHLVHWNTKYGDFGKAVQQPDGLAVL | | |
| | GIFLKVG SAKPGHQKVVDVLDSIKTKGKSADFTNFDPRGLLPESLDYWT | | |
| | YPGSLTTPPLLECVTWIVLKEPISVSSEQVLKLRKLNFNGEGEPEELMVD | | |
| | NWRPAQPLKNRQIKASFK | | |
| CA2(M1del, | SHHWGYGKHNGPEHWHKDFPIAKGERQSPVDIDTHTAKYDPSLKPLSV | 6108 | 6144 |
| D71N, D75N, | SYDQATSLRILNNGHAFNVEFNDSQNKAVLKGGPLDGTYRLIQFHFHW | | |
| D101N, L156H)- | GSLNGQGSEHTVDKKKYAAELHLVHWNTKYGDFGKAVQQPDGLAVL | | |
| variant 1 | GIFLKVGSAKPGHQKVVDVLDSIKTKGKSADFTNFDPRGLLPESLDYWT | | |
| | YPGSLTTPPLLECVTWIVLKEPISVSSEQVLKFRKLNFNGEGEPEELMVD | | |
| | NWRPAQPLKNRQIKASFK | | |

[0096] In some embodiments a region or a portion of the CA2 WT may be used as template for generating CA2 DDs. In some embodiments, the CA2 DDs may exclude the lysine at position 260 of SEQ ID NO. 5810. In some aspects, the CA2 regions may include but are not limited to those described in Table 5.

TABLE 5
CA2 regions

| | | AA SEQ | NA SEQ |
|---|---|---|---|
| Description | AA SEQUENCE | ID NO. | ID NO. |
| CA2 (aa 1- | MSHHWGYGKHNGPEHWHKDFPIAKGERQSPVDIDTHTAKYDPSLKPLSVSYDQATSLRI | 5941 | — |
| 142 of WT) | LNNGHAFNVEFDDSQDKAVLKGGPLDGTYRLIQFHFHWGSLDGQGSEHTVDKKKYAA | | |
| | ELHLVHWNTKYGDFGKAVQQPDGLAV | | |
| CA2 (aa 2- | SHHWGYGKHNGPEHWHKDFPIAKGERQSPVDIDTHTAKYDPSLKPLSVSYDQATSLRIL | 5942 | — |
| 142 of WT) | NNGHAFNVEFDDSQDKAVLKGGPLDGTYRLIQFHFHWGSLDGQGSEHTVDKKKYAAE | | |
| | LHLVHWNTKYGDFGKAVQQPDGLAV | | |
| CA2 (aa 1- | MSHHWGYGKHNGPEHWHKDFPIAKGERQSPVDIDTHTAKYDPSLKPLSVSYDQATSLRI | 5943 | — |
| 190 of WT) | LNNGHAFNVEFDDSQDKAVLKGGPLDGTYRLIQFHFHWGSLDGQGSEHTVDKKKYAA | | |
| | ELHLVHWNTKYGDFGKAVQQPDGLAVLGIFLKVGSAKPGLQKVVDVLDSIKTKGKSAD | | |
| | FTNFDPRGLLPESLDY | | |
| CA2 (aa 2- | SHHWGYGKHNGPEHWHKDFPIAKGERQSPVDIDTHTAKYDPSLKPLSVSYDQATSLRIL | 5944 | — |
| 190 of WT) | NNGHAFNVEFDDSQDKAVLKGGPLDGTYRLIQFHFHWGSLDGQGSEHTVDKKKYAAE | | |
| | LHLVHWNTKYGDFGKAVQQPDGLAVLGIFLKVGSAKPGLQKVVDVLDSIKTKGKSADF | | |
| | TNFDPRGLLPESLDY | | |
| CA2 (aa 1- | MSHHWGYGKHNGPEHWHKDFPIAKGERQSPVDIDTHTAKYDPSLKPLSVSYDQATSLRI | 5945 | — |
| 89 of WT) | LNNGHAFNVEFDDSQDKAVLKGGPLDGTYR | | |
| CA2 (aa 2- | SHHWGYGKHNGPEHWHKDFPIAKGERQSPVDIDTHTAKYDPSLKPLSVSYDQATSLRIL | 5946 | — |
| 89 of WT) | NNGHAFNVEFDDSQDKAVLKGGPLDGTYR | | |
| CA2 (aa 1- | MSHHWGYGKHNGPEHWHKDFPIAKGERQSPVDIDTHTAKYDPSLKPLSVSYDQATSLRI | 5947 | — |
| 243 of WT) | LNNGHAFNVEFDDSQDKAVLKGGPLDGTYRLIQFHFHWGSLDGQGSEHTVDKKKYAA | | |
| | ELHLVHWNTKYGDFGKAVQQPDGLAVLGIFLKVGSAKPGLQKVVDVLDSIKTKGKSAD | | |
| | FTNFDPRGLLPESLDYWTYPGSLTTPPLLECVTWIVLKEPISVSSEQVLKFRKLNFNGE | | |
| | GEPEELMVDN | | |
| CA2 (aa 2- | SHHWGYGKHNGPEHWHKDFPIAKGERQSPVDIDTHTAKYDPSLKPLSVSYDQATSLRIL | 5948 | — |
| 243 of WT) | NNGHAFNVEFDDSQDKAVLKGGPLDGTYRLIQFHFHWGSLDGQGSEHTVDKKKYAAE | | |
| | LHLVHWNTKYGDFGKAVQQPDGLAVLGIFLKVGSAKPGLQKVVDVLDSIKTKGKSADF | | |
| | TNFDPRGLLPESLDYWTYPGSLTTPPLLECVTWIVLKEPISVSSEQVLKFRKLNFNGEG | | |
| | EPEELMVDN | | |
| CA2 (aa 1- | MSHHWGYGKHNGPEHWHKDFPIAKGERQSPVDIDTHTAKYDPSLKPLSVSYDQATSLRI | 5949 | — |
| 166 of WT) | LNNGHAFNVEFDDSQDKAVLKGGPLDGTYRLIQFHFHWGSLDGQGSEHTVDKKKYAA | | |
| | ELHLVHWNTKYGDFGKAVQQPDGLAVLGIFLKVGSAKPGLQKVVDVLDSI | | |
| CA2 (aa 2- | SHHWGYGKHNGPEHWHKDFPIAKGERQSPVDIDTHTAKYDPSLKPLSVSYDQATSLRIL | 5903 | 5950 |
| 166 of WT) | NNGHAFNVEFDDSQDKAVLKGGPLDGTYRLIQFHFHWGSLDGQGSEHTVDKKKYAAE | | |
| | LHLVHWNTKYGDFGKAVQQPDGLAVLGIFLKVGSAKPGLQKVVDVLDSI | | |
| CA2 (aa 1- | MSHHWGYGKHNGPEHWHKDFPIAKGERQSPVDIDTHTAKYDPSLKPLSVSYDQATSLRI | 5951 | — |
| 116 of WT) | LNNGHAFNVEFDDSQDKAVLKGGPLDGTYRLIQFHFHWGSLDGQGSEHTVDKKKYAA | | |
| CA2 (aa 2- | SHHWGYGKHNGPEHWHKDFPIAKGERQSPVDIDTHTAKYDPSLKPLSVSYDQATSLRIL | 5952 | — |
| 116 of WT) | NNGHAFNVEFDDSQDKAVLKGGPLDGTYRLIQFHFHWGSLDGQGSEHTVDKKKYAA | | |
| CA2 (aa 1- | MSHHWGYGKHNGPEHWHKDFPIAKGERQSPVDIDTHTAKYDPSLKPLSVSYDQATSLRI | 5953 | — |
| 152 of WT) | LNNGHAFNVEFDDSQDKAVLKGGPLDGTYRLIQFHFHWGSLDGQGSEHTVDKKKYAA | | |
| | ELHLVHWNTKYGDFGKAVQQPDGLAVLGIFLKVGSA | | |
| CA2 (aa 2- | SHHWGYGKHNGPEHWHKDFPIAKGERQSPVDIDTHTAKYDPSLKPLSVSYDQATSLRIL | 5954 | — |
| 152 of WT) | NNGHAFNVEFDDSQDKAVLKGGPLDGTYRLIQFHFHWGSLDGQGSEHTVDKKKYAAE | | |
| | LHLVHWNTKYGDFGKAVQQPDGLAVLGIFLKVGSA | | |
| CA2 (aa 1- | MSHHWGYGKHNGPEHWHKDFPIAKGERQSPVDIDTHTAKYDPS | 5955 | — |
| 43 of WT) | | | |
| CA2 (aa 2- | SHHWGYGKHNGPEHWHKDFPIAKGERQSPVDIDTHTAKYDPS | 5956 | — |
| 43 of WT) | | | |

[0097] Any of the CA2 regions described herein may be utilized to generate CA2 DD. Table 6 provides CA2 DDs derived from CA2 regions.

TABLE 6
CA2 DDs derived from CA2 regions

| | | AA | NA |
|---|---|---|---|
| | | SEQ | SEQ |
| | | ID | ID |
| Description | AA SEQUENCE | NO. | NO. |
| CA2 (aa 2-142 of WT, G12E, A38V, A65V, | SHHWGYGKHNEPEHWHKDFPIAKGERQSPVDIDTHT | 5883 | 5957 |
| G98V, S99H, D101M, G102D, Q103K, | VKYDPSLKPLSVSYDQATSLRILNNGHVFNVEFDDSQ | | |
| G104V, S105Q, E106S, H107I, T108L, | DKAVLKGGPLDGTYRLIQFHFHWVHLMDKVQSILWI | | |
| V109W, D110I, K112R, K113N, Y114M, | KRNMLQNFTWFTGTPNMGILGELCSNLMDWPF | | |
| A115L, A116Q, E117N, L118F, H119T, | | | |
| L120W, V121F, H122T, W123G, N124T, | | | |
| T125P, K126N, Y127M, D129I, F130L, | | | |
| K132E, A133L, V134C, Q1355, Q136N, | | | |
| P137L, D138M, G139D, L140W, A141P, | | | |
| V142F) | | | |
| CA2 (aa 2-190 of WT, F20L, K45N, G104R, | SHHWGYGKHNGPEHWHKDLPIAKGERQSPVDIDTHT | 5886 | 5958 |
| A116V, A173G) | AKYDPSLNPLSVSYDQATSLRILNNGHAFNVEFDDSQ | | |
| | DKAVLKGGPLDGTYRLIQFHFHWGSLDGQRSEHTVD | | |
| | KKKYAVELHLVHWNTKYGDFGKAVQQPDGLAVLGI | | |
| | FLKVGSAKPGLQKVVDVLDSIKTKGKSGDFTNFDPRG | | |
| | LLPESLDY | | |
| CA2 (aa 2-190 of WT, H17D, P3OS, G81V, | SHHWGYGKHNGPEHWDKDFPIAKGERQSSVDIDTHT | 5889 | 5959 |
| K132R, S151I, A152D, A173G) | AKYDPSLKPLSVSYDQATSLRILNNGHAFNVEFDDSQ | | |
| | DKAVLKVGPLDGTYRLIQFHFHWGSLDGQGSEHTVD | | |
| | KKKYAAELHLVHWNTKYGDFGRAVQQPDGLAVLGI | | |
| | FLKVGIDKPGLQKVVDVLDSIKTKGKSGDFTNFDPRG | | |
| | LLPESLDY | | |
| CA2 (aa 2-89 of WT, I59N) | SHHWGYGKHNGPEHWHKDFPIAKGERQSPVDIDTHT | 5892 | 5960 |
| | AKYDPSLKPLSVSYDQATSLRNLNNGHAFNVEFDDS | | |
| | QDKAVLKGGPLDGTYR | | |
| CA2 (aa 2-243 of WT, T35I, Y114H, | SHHWGYGKHNGPEHWHKDFPIAKGERQSPVDIDIHT | 5895 | 5961 |
| P154L, D161V, P200A, Q221R, F225L, | AKYDPSLKPLSVSYDQATSLRILNNGHAFNVEFDDSQ | | |
| E233D) | DKAVLKGGPLDGTYRLIQFHFHWGSLDGQGSEHTVD | | |
| | KKKHAAELHLVHWNTKYGDFGKAVQQPDGLAVLGI | | |
| | FLKVGSAKLGLQKVVVVLDSIKTKGKSADFTNFDPRG | | |
| | LLPESLDYWTYPGSLTTAPLLECVTWIVLKEPISVSSE | | |
| | RVLKLRKLNFNGDGEPEELMVDN | | |
| CA2 (aa 2-189 of WT, S105L, L140V, | SHHWGYGKHNGPEHWHKDFPIAKGERQSPVDIDTHT | 5898 | 5962 |
| G155C) | AKYDPSLKPLSVSYDQATSLRILNNGHAFNVEFDDSQ | | |
| | DKAVLKGGPLDGTYRLIQFHFHWGSLDGQGLEHTVD | | |
| | KKKYAAELHLVHWNTKYGDFGKAVQQPDGVAVLGI | | |
| | FLKVGSAKPCLQKVVDVLDSIKTKGKSADFTNFDPRG | | |
| | LLPESLD | | |
| CA2 (aa 2-243 of WT, T35I, Y114H, | SHHWGYGKHNGPEHWHKDFPIAKGERQSPVDIDIHT | 5901 | 5963 |
| P154L, D161V, P200A, F225L, E233D) | AKYDPSLKPLSVSYDQATSLRILNNGHAFNVEFDDSQ | | |
| | DKAVLKGGPLDGTYRLIQFHFHWGSLDGQGSEHTVD | | |
| | KKKHAAELHLVHWNTKYGDFGKAVQQPDGLAVLGI | | |
| | FLKVGSAKLGLQKVVVVLDSIKTKGKSADFTNFDPRG | | |
| | LLPESLDYWTYPGSLTTAPLLECVTWIVLKEPISVSSE | | |
| | QVLKLRKLNFNGDGEPEELMVDN | | |
| CA2 (aa 2-116 of WT, P13H) | SHHWGYGKHNGHEHWHKDFPIAKGERQSPVDIDTHT | 5914 | 5964 |
| | AKYDPSLKPLSVSYDQATSLRILNNGHAFNVEFDDSQ | | |
| | DKAVLKGGPLDGTYRLIQFHFHWGSLDGQGSEHTVD | | |
| | KKKYAA | | |
| CA2 (aa 2-152 of WT, A133T, L147F, | SHHWGYGKHNGPEHWHKDFPIAKGERQSPVDIDTHT | 5920 | 5965 |
| K148E, V149G, G150W, S151Q, A152R) | AKYDPSLKPLSVSYDQATSLRILNNGHAFNVEFDDSQ | | |
| | DKAVLKGGPLDGTYRLIQFHFHWGSLDGQGSEHTVD | | |
| | KKKYAAELHLVHWNTKYGDFGKTVQQPDGLAVLGI | | |
| | FFEGWQR | | |
| CA2 (aa 2-152 of WT, F2OL, K45N, G104R, | SHHWGYGKHNGPEHWHKDLPIAKGERQSPVDIDTHT | 5929 | 5966 |
| A116V, L147F, K148E, V149G, G150W, | AKYDPSLNPLSVSYDQATSLRILNNGHAFNVEFDDSQ | | |
| 5151Q, A152R) | DKAVLKGGPLDGTYRLIQFHFHWGSLDGQRSEHTVD | | |
| | KKKYAVELHLVHWNTKYGDFGKAVQQPDGLAVLGI | | |
| | FFEGWQR | | |
| CA2 (aa 2-43 of WT, N11K, G12D, P13L, | SHHWGYGKHKDLNTGIRTSPLPRESASPLLTSTLIQPS | 5932 | 5967 |
| E14N, HIST, W16G, H17I, K18R, D19T, | MTLP | | |
| F20S, I22L, A23P, K24R, G25E, E26S, | | | |
| R27A, Q285, S29P, P3OL, V31L, D32T, | | | |
| I33S, D34T, T35L, H36I, T37Q, A38P, | | | |
| K39S, Y40M, D41T, P42L, S43P) | | | |

[0098] In some embodiments, DDs derived from CA2 may include one, two, three, four, five, or more of the mutations described in the previous Tables.

[0099] In some embodiments, a DD derived from CA2 comprises at least one mutation relative to the amino acid sequence of wildtype CA2, which mutation, in the absence of a stimulus, destabilizes the DD and at least one payload that is operably linked to the DD or an SRE comprising the DD. In the presence of the stimulus, the DD and the at least one payload are stabilized. In some embodiments, the DD derived from CA2 includes one, two, three, four or more mutations that, in the absence of the stimulus, destabilizes the DD and the at least one operably linked payload. In some embodiments, the destabilization ratio of a DD derived from CA2 comprising the at least one mutation is lower than the destabilization ratio of wildtype CA2. In some embodiments, the stabilization ratio of a DD derived from CA2 comprising the at least one mutation is higher than the stabilization ratio of wildtype CA2. In some embodiments, a DD may comprise one or more additional mutations that do not significantly affect the destabilization and stabilization ratios.

[0100] In some embodiments, the mutation may be a conserved (with similar physicochemical properties as the amino acid at the mutation site), a semi conserved (e.g., negatively to positively charge amino acid) or a non-conserved (amino acid with different physicochemical properties than the amino acid at the mutation site). In some embodiments, the amino acid lysine may be mutated to glutamic acid or arginine; the amino acid phenylalanine may be mutated to leucine; the amino acid leucine may be mutated to phenylalanine; or the amino acid asparagine may be mutated to serine. Regions or portions or domains of wild type proteins may be utilized as SREs/DDs in whole or in part. They may be combined or rearranged to create new peptides, proteins, regions or domains of which any may be used as SREs/DDs or the starting point for the design of further SREs and/or DDs.

[0101] The destabilization domains described herein may also include amino acid and nucleotide substitutions that do not affect stability, including conservative, non-conservative substitutions and or polymorphisms. In some embodiments, CA2 DDs described herein may also be fragments of the above destabilizing domains, including fragments containing variant amino acid sequences. Preferred fragments are unstable in the absence of the stimulus and stabilized upon addition of the stimulus. Preferred fragments retain the ability to interact with the stimulus with similar efficiency as the DDs described herein.

[0102] In one embodiment, the SRE comprises a region of the CA2 protein. The region of the CA2 protein may be 10, 11, 12, 13, 14, 15, 16, 17, 18, 19, 20, 21, 22, 23, 24, 25, 26, 27, 28, 29, 30, 31, 32, 33, 34, 35, 36, 37, 38, 39, 40, 41, 42, 43, 44, 45, 46, 47, 48, 49, 50, 51, 52, 53, 54, 55, 56, 57, 58, 59, 60, 61, 62, 63, 64, 65, 66, 67, 68, 69, 70, 71, 72, 73, 74, 75, 76, 77, 78, 79, 80, 81, 82, 83, 84, 85, 86, 87, 88, 89, 90, 91, 92, 93, 94, 95, 96, 97, 98, 99, 100, 101, 102, 103, 104, 105, 106, 107, 108, 109, 110, 111, 112, 113, 114, 115, 116, 117, 118, 119, 120, 121, 122, 123, 124, 125, 126, 127, 128, 129, 130, 131, 132, 133, 134, 135, 136, 137, 138, 139, 140, 141, 142, 143, 144, 145, 146, 147, 148, 149, 150, 151, 152, 153, 154, 155, 156, 157, 158, 159, 160, 161, 162, 163, 164, 165, 166, 167, 168, 169, 170, 171, 172, 173, 174, 175, 176, 177, 178, 179, 180, 181, 182, 183, 184, 185, 186, 187, 188, 189, 190, 191, 192, 193, 194, 195, 196, 197, 198, 199, 200, 201, 202, 203, 204, 205, 206, 207, 208, 209, 210, 211, 212, 213, 214, 215, 216, 217, 218, 219, 220, 221, 222, 223, 224, 225, 226, 227, 228, 229, 230, 231, 232, 233, 234, 235, 236, 237, 238, 239, 240, 241, 242, 243, 244, 245, 246, 247, 248, 249, 250, 251, 252, 253, 254, 255, 256, 257, 258, 259, 260 or more than 260 amino acids in length. The region of the parent protein may be 5-50, 25-75, 50-100, 75-125, 100-150, 125-175, 150-200, 175-225, 200-250, 225-260 amino acids in length.

[0103] In some embodiments, the present disclosure provides a DD comprising a region of or the whole human carbonic anhydrase 2 (CA2; SEQ ID NO. 5810), and further comprising a mutation relative to SEQ ID NO. 5810 selected from A115L, A116Q, A116V, A133L, A133T, A141P, A152D, A152L, A152R, A173C, A173G, A173L, A173T, A23P, A247L, A247S, A257L, A257S, A38P, A38V, A54Q, A54V, A54X, A65L, A65N, A65V, A77I, A77P, A77Q, C205M, C205R, C205V, C205W, C205Y, D101G, D101M, D11I, D129I, D138G, D138M, D138N, D161*, D161M, D161V, D164G, D164I, D174*, D174T, D179E, D179I, D179R, D189G, D189I, D19T, D19V, D242G, D242T, D32T, D34T, D41T, D52I, D52L, D71F, D71G, D71K, D77M, D71S, D71Y, D72I, D72S, D72T, D72X, D75T, D75V, D85M, E106D, E106G, E106S, E117*, E117N, E14N, E186*, E186N, E204A, E204D, E204G, E204N, E213*, E213G, E213N, E220K, E220R, E220S, E233D, E233G, E233R, E235*, E235G, E235N, E237K, E237R, E238*, E238N, E238R, E26S, E69D, E69K, E69S, F130L, F146V, F175I, F175L, F175S, F178L, F178S, F20L, F20S, F225I, F225L, F225S, F225Y, F230I, F230L, F230S, F259L, F259S, F66S, F70I, F70L, F95Y, G102D, G104R, G104V, G128R, G12D, G12E, G131E, G131R, G131W, G139D, G144D, G144V, G150A, G150S, G150W, G155A, G155C, G155D, G155S, G170A, G170D, G182A, G182W, G195A, G195R, G232R, G232W, G234L, G234V, G25E, G63D, G63V, G81E, G81V, G82D, G86A, G86D, G98V, H107I, H107Q, H119T, H119Y, H122T, H122Y, H15L, H15T, H15Y, H1D, H17I, H36I, H36Q, H64M, H94T, H96T, I145F, I145M, I166H, I166L, I209D, I209L, I215H, I215S, I22L, I255N, I255S, I33S, I59F, I59N, I59S, I91F, K111E, K111N, K1l2R, K113I, K113N, K126N, K132E, K132R, K148E, K148R, K153*, K153N, K158E, K158N, K167*, K169N, K169R, K171Q, K171R, K18R, K212N, K212Q, K212R, K212W, K224E, K224N, K227*, K227N, K24R, K251E, K251R, K256Q, K260F, K260L, K260Q, K39S, K45N, K45S, K80M, K80R, L118F, L120W, L140V, L140W, L143*, L147*, L147F, L156F, L156H, L156P, L156Q, L163A, L163W, L183P, L183S, L184F, L184P, L188P, L188W, L197*, L197M, L197P, L197R, L197T, L202F, L202H, L202I, L202P, L202R, L202S, L203P, L203S, L203W, L211*, L211A, L211S, L223*, L223I, L223V, L228F, L228H, L228T, L239*, L239F, L239T, L250*, L250P, L250T, L44*, L44M, L47C, L47V, L57*, L57X, L60S, L79F, L79S, L84W, L90*, L90V, M240D, M240L, M240R, M240W, N11D, N11K, N124T, N177*, N177T, N229*, N229T, N231D, N231F, N231K, N231L, N231M, N231Q, N231T, N243Q, N243T, N252E, N252T, N61R, N61T, N61Y, N62K, N62M, N67D, N67T, P137L, P13A, P13H, P13L, P13S, P154L, P154R, P154T, P180L, P180S, P185L, P185S, P185V, P194Q, P200A, P200L, P200S, P200T, P201A, P201L, P201R, P201S, P214T, P236L, P236T, P246L, P246Q, P249A, P249F, P249H, P249I, P249X, P30L, P30S, P42L, P83A, Q103K, Q135S, Q136N, Q157R, Q157S, Q221A, Q221R, Q248F, Q248L, Q248S, Q254A, Q254K, Q28S, Q53H, Q53K, Q53N, Q74R, Q92H, Q92S, R181H, R181S, R181V, R226H, R226P, R226V, R245A, R253G, R253Q, R27A, R58G, R89D, R89F, R89I, R89X, R89Y, S105L, S105Q, S151A, S151I, S151Q, S165F, S165P, S172E, S172V, S187I, S187P, S196H, S196L, S216A, S216Q, S218A, S218Q, S219A, S219Q, S258F, S258P, S29C, S29P, S43P, S43T, S48L, S50P, S56F, S56N, S56P, S56X, S73L, S73N, S73X, S99H, T108L, T125I, T125P, T168K, T168N, T168Q, T176H, T176L, T192D, T192F, T1921, T192N, T192P, T192X, T198D, T1981, T198P, T199A, T199H, T199P, T207D, T207I, T207P, T207S, T35I, T35L, T37Q, T55L, T87L, V109M, V109W, V121F, V134C, V134F, V142F, V149G, V149L, V159L, V159S, V160C, V160L, V162A, V162C, V206*, V206C, V206M, V210C, V217L, V217R, V217S, V222A, V222C, V222G, V241G, V241W, V241X, V31L, V49F, V68L, V68W, V78C, W123G, W123R, W16G, W191*, W191G, W191L, W208G, W208L, W208S, W244*, W244G, W244L, W97C, W97G, Y114H, Y114M, Y127M, Y190*, Y190L, Y190T, Y193C, Y193F, Y193I, Y193L, Y193T, Y193V, Y193X, Y40M, Y51F, Y51M, Y51T, Y51X, Y88T, K9N, and S29A. As used herein, “*” indicates the translation of the stop codon and “X” indicates any amino acid.

[0104] In some embodiments, the present disclosure provides a DD comprising a region of or the whole human carbonic anhydrase 2 (CA2; SEQ ID NO. 5810), and further comprising a mutation relative to SEQ ID NO. 5810 selected from E106D, G63D, H122Y, I59N, L156H, L183S, L197P, S56F, S56N, W208S, Y193I, and Y51T.

[0105] In some embodiments, the present disclosure provides a DD comprising a region of or the whole human carbonic anhydrase 2 (CA2; SEQ ID NO. 5810), and further comprising two or more mutations relative to SEQ ID NO. 5810. In some embodiments, a DD may comprise CA2 (aa 2-260 of WT, R27L, H122Y), CA2 (aa 2-260 of WT, T87I, H122Y), CA2 (aa 2-260 of WT, H122Y, N252D), CA2 (aa 2-260 of WT, D72F, V241F), CA2 (aa 2-260 of WT, V241F, P249L), CA2 (aa 2-260 of WT, D72F, P249L), CA2 (aa 2-260 of WT, D71L, L250R), CA2 (aa 2-260 of WT, D72F, P249F), CA2 (aa 2-260 of WT, T55K, G63N, Q248N), CA2 (aa 2-260 of WT, L156H, A257del, S258del, F259del, K260del), CA2 (aa 2-260 of WT, L156H, S2del, H3del, H4del, W5del), CA2 (aa 2-260 of WT, W4Y, L156H), CA2 (aa 2-260 of WT, L156H, G234del, E235del, P236del), CA2 (aa 2-260 of WT, L156H, F225L), CA2 (aa 2-260 of WT, D70N, D74N, D100N, L156H), (CA2 (aa 2-260 of WT, I59N, G102R), CA2 (aa 2-260 of WT, G63D, E69V, N231I), CA2 (aa 2-260 of WT, R27L, T87I, H122Y, N252D), CA2 (aa 2-260 of WT, D72F, V241F, P249L), CA2 (aa 2-260 of WT, D71L, T87N, L250R), CA2 (aa 2-260 of WT, L156H, S172C, F178Y, E186D), CA2 (aa 2-260 of WT, D71F, N231F), CA2 (aa 2-260 of WT, A77I, P249F), CA2 (aa 2-260 of WT, D71K, P249H), CA2 (aa 2-260 of WT, D72F, P249H), CA2 (aa 2-260 of WT, Q53N, N61Y), CA2 (aa 2-260 of WT, E106D, C205S), CA2 (aa 2-260 of WT, C205S, W208S), CA2 (aa 2-260 of WT, S73N, R89Y), CA2 (aa 2-260 of WT, D71K, T192F), CA2 (aa 2-260 of WT, Y193L, K260L), CA2 (aa 2-260 of WT, D71F, V241F, P249L), CA2 (aa 2-260 of WT, L147F, Q248F), CA2 (aa 2-260 of WT, D52I, S258P), CA2 (aa 2-260 of WT, D72S, T192N), CA2 (aa 2-260 of WT, D179E, T192I), CA2 (aa 2-260 of WT, S56N, Q103K), CA2 (aa 2-260 of WT, D71Y, Q248L), CA2 (aa 2-260 of WT, S73N, R89F), CA2 (aa 2-260 of WT, D71K, N231L, E235G, L239F), CA2 (aa 2-260 of WT, D72F, P249I), CA2 (aa 2-260 of WT, D72X, V241X, P249X), CA2 (aa 2-260 of WT, A54X, S56X, L57X, T192X), CA2 (aa 2-260 of WT, Y193V, K260F), CA2 (aa 2-260 of WT, G63D, M240L), CA2 (aa 2-260 of WT, V134F, L228F), CA2 (aa 2-260 of WT, D71G, N231K), CA2 (aa 2-260 of WT, S56F, D71S), CA2 (aa 2-260 of WT, D52L, G128R, Q248F), CA2 (aa 2-260 of WT, S73X, R89X), CA2 (aa 2-260 of WT, Y51X, D72X, V241X, P249X), CA2 (aa 2-260 of WT, D72I, W97C), CA2 (aa 2-260 of WT, D71K, T192F, N231F), CA2 (aa 2-260 of WT, H36Q, S43T, Y51F, N67D, G131W, R226H), CA2 (aa 2-260 of WT, F70I, F146V), CA2 (aa 2-260 of WT, K45N, V68L, H119Y, K169R, D179E), CA2 (aa 2-260 of WT, H15L, A54V, K111E, E220K, F225I), CA2 (aa 2-260 of WT, P13S, P83A, D101G, K111N, F230I), CA2 (aa 2-260 of WT, G63D, W123R, E220K), CA2 (aa 2-260 of WT, N11D, E69K, G86D, V109M, K113I, T125I, D138G, G155S), CA2 (aa 2-260 of WT, I59N, G102R, A173T), CA2 (aa 2-260 of WT, L79F, P180S), CA2 (aa 2-260 of WT, A77P, G102R, D138N), CA2 (aa 2-260 of WT, F20L, K45N, G63D, E69V, N231I), CA2 (aa 2-260 of WT, T199N, L202P, L228F), CA2 (aa 2-260 of WT, K9N, H122Y, T168K), CA2 (aa 2-260 of WT, Q53H, L90V, Q92H, G131E), CA2 (aa 2-260 of WT, L44M, L47V, N62K, E69D), CA2 (aa 2-260 of WT, D75V, K169N, F259L), CA2 (aa 2-260 of WT, T207S, V222A, N231D), CA2 (aa 2-260 of WT, I59F, V206M, G232R), CA2 (aa 2-260 of WT, P13A, A133T), CA2 (aa 2-260 of WT, I59N, R89I), CA2 (aa 2-260 of WT, A65N, G86D, G131R, G155D, K158N, V162A, G170D, P236L), CA2 (aa 2-260 of WT, G12R, H15Y, D19V), CA2 (aa 2-260 of WT, A65V, F95Y, E106G, H107Q, I145M, F175I), CA2 (aa 2-260 of WT, G63D, E69V, N231I), CA2 (aa 2-260 of WT, S29A, C205S) and/or CA2 (aa 2-260 of WT, S29C, C205S). As used herein, “X” indicates any amino acid.

[0106] In some embodiments, a DD may comprise CA2 (aa 2-260 of WT, R27L, H122Y), CA2 (aa 2-260 of WT, T87I, H122Y), CA2 (aa 2-260 of WT, H122Y, N252D), CA2 (aa 2-260 of WT, D72F, V241F), CA2 (aa 2-260 of WT, V241F, P249L), CA2 (aa 2-260 of WT, D72F, P249L), CA2 (aa 2-260 of WT, D71L, L250R), CA2 (aa 2-260 of WT, D72F, P249F), CA2 (aa 2-260 of WT, T55K, G63N, Q248N), CA2 (aa 2-260 of WT, L156H, A257del, S258del, F259del, K260del), CA2 (aa 2-260 of WT, L156H, S2del, H3del, H4del, W5del), CA2 (aa 2-260 of WT, W4Y, L156H), CA2 (aa 2-260 of WT, L156H, G234del, E235del, P236del), CA2 (aa 2-260 of WT, L156H, F225L), CA2 (aa 2-260 of WT, D70N, D74N, D100N, L156H), (CA2 (aa 2-260 of WT, I59N, G102R), CA2 (aa 2-260 of WT, G63D, E69V, N231I), CA2 (aa 2-260 of WT, R27L, T87I, H122Y, N252D), CA2 (aa 2-260 of WT, D72F, V241F, P249L), CA2 (aa 2-260 of WT, D71L, T87N, L250R), CA2 (aa 2-260 of WT, L156H, S172C, F178Y, E186D), CA2 (aa 2-260 of WT, A77I, P249F), CA2 (aa 2-260 of WT, E106D, C205S), CA2 (aa 2-260 of WT, C205S, W208S), CA2 (aa 2-260 of WT, S73N, R89Y), CA2 (aa 2-260 of WT, D71K, T192F), CA2 (aa 2-260 of WT, S73N, R89F), CA2 (aa 2-260 of WT, G63D, M240L), CA2 (aa 2-260 of WT, V134F, L228F), and/or CA2 (aa 2-260 of WT, S56F, D71S).

[0107] In some embodiments, the CA2 may be derived from carbonic anhydrases of Homo sapiens. In some embodiments, the CA2 DDs described herein may have at least 40%, 45%, 50%, 55%, 60%, 65%, 70%, 75%, 80%, 85%, 90%, 91%, 92%, 93%, 94%, 95%, 96%, 97%, 98%, 99% but less than 100% sequence identity to a particular reference polynucleotide or polypeptide as determined by sequence alignment programs and parameters described herein and known to those skilled in the art. In some embodiments the reference polypeptide may be SEQ ID NO. 5810. Tools for alignment may include those of the BLAST suite (Stephen F. Altschul, et al. (1997), “Gapped BLAST and PSI-BLAST: a new generation of protein database search programs”, Nucleic Acids Res. 25:3389-3402).

[0108] In some embodiments, the CA2 DDs may be derived from carbonic anhydrases of species other than Homo sapiens. In some embodiments, the CA2 DDs may be derived from carbonic anhydrases of species such as but not limited to Acinonyx jubatus, Ailuropoda melanoleuca, Balaenoptera acutorostrata scammoni, Callithrix jacchus, Callorhinus ursinus, Camelus bactrianus, Camelus dromedarius, Camelus ferus, Canis lupus dingo, Canis lupus familiaris, Carlito syrichta, Castor canadensis, Cebus capucinus imitator, Ceratotherium simum simum, Cercocebus atys, Chinchilla lanigera, Chlorocebus sabaeus, Colobus angolensis palliatus, Delphinapterus leucas, Dipodomys ordii, Enhydra lutris kenyoni, Equus asinus, Equus caballus, Equus przewalskii, Erinaceus europaeus, Eumetopias jubatus, Felis catus, Galeopterus variegatus, Gorilla gorilla gorilla, Homo sapiens, Ictidomys tridecemlineatus, Jaculus jaculus, Lagenorhynchus obliquidens, Lemur catta, Leptonychotes weddellii, Lipotes vexillifer, Loxodonta africana, Macaca fascicularis, Macaca mulatta, Macaca nemestrina, Mandrillus leucophaeus, Manis javanica, Marmota flaviventris, Marmota marmota marmota, Microcebus murinus, Mus caroli, Mus musculus, Mus pahari, Mustela putorius furo, Nannospalax galili, Neomonachus schauinslandi, Neophocaena asiaeorientalis asiaeorientalis, Nomascus leucogenys, Odobenus rosmarus divergens, Orcinus orca, Oryctolagus cuniculus, Otolemur garnettii, Pan paniscus, Pan troglodytes, Panthera pardus, Panthera tigris altaica, Papio anubis, Physeter catodon, Piliocolobus tephrosceles, Pongo abelii, Propithecus coquereli, Puma concolor, Rhinopithecus bieti, Rhinopithecus roxellana, Saimiri boliviensis boliviensis, Sus scrofa, Theropithecus gelada, Trichechus manatus latirostris, Tupaia chinensis, Tursiops truncatus, Urocitellus parryii, Ursus arctos horribilis, Ursus maritimus, Vulpes vulpes, and/or Zalophus californianus.

### Stabilization and Destabilization Ratio of SRE

[0109] In some embodiments, the present disclosure provides methods for modulating protein expression, function or level by measuring the stabilization ratio and destabilization ratio. As used herein, the stabilization ratio may be defined as the ratio of expression, function or level of a protein of interest in response to the stimulus to the expression, function or level of the protein of interest in the absence of the stimulus specific to the SRE. In some aspects, the stabilization ratio is at least 1, such as by at least 1-10, 1-20, 1-30, 1-40, 1-50, 1-60, 1-70, 1-80, 1-90, 1-100, 20-30, 20-40, 20-50, 20-60, 20-70, 20-80, 20-90, 20-95, 20-100, 30-40, 30-50, 30-60, 30-70, 30-80, 30-90, 30-95, 30-100, 40-50, 40-60, 40-70, 40-80, 40-90, 40-95, 40-100, 50-60, 50-70, 50-80, 50-90, 50-95, 50-100, 60-70, 60-80, 60-90, 60-95, 60-100, 70-80, 70-90, 70-95, 70-100, 80-90, 80-95, 80-100, 90-95, 90-100 or 95-100. As used herein, the destabilization ratio may be defined as the ratio of expression, function or level of a protein of interest in the absence of the stimulus specific to the SRE to the expression, function or level of the protein of interest, that is expressed constitutively and in the absence of the stimulus specific to the SRE. As used herein “constitutively” refers to the expression, function or level of a protein of interest that is not linked to an SRE and is therefore expressed both in the presence and absence of the stimulus. In some aspects, the destabilization ratio is at least 0, such as by at least 0.1, 0.2, 0.3, 0.4, 0.5, 0.6, 0.7, 0.8, 0.9, or at least, 0-0.1, 0-0.2, 0-0.3, 0-0.4, 0-0.5, 0-0.6, 0-0.7, 0-0.8, 0-0.9, 0.1-0.2, 0.1-0.3, 0.1-0.4, 0.1-0.5, 0.1-0.6, 0.1-0.7, 0.1-0.8, 0.1-0.9, 0.2-0.3, 0.2-0.4, 0.2-0.5, 0.2-0.6, 0.2-0.7, 0.2-0.8, 0.2-0.9, 0.3-0.4, 0.3-0.5, 0.3-0.6, 0.3-0.7, 0.3-0.8, 0.3-0.9, 0.4-0.5, 0.4-0.6, 0.4-0.7, 0.4-0.8, 0.4-0.9, 0.5-0.6, 0.5-0.7, 0.5-0.8, 0.5-0.9, 0.6-0.7, 0.6-0.8, 0.6-0.9, 0.7-0.8, 0.7-0.9 or 0.8-0.9.

[0110] In some embodiments, the SRE of the effector module may stabilize the payload of interest by a stabilization ratio of 1 or more, wherein the stabilization ratio may comprise the ratio of expression, function or level of the payload of interest in the presence of the stimulus to the expression, function or level of the payload of interest in the absence of the stimulus.

[0111] In some embodiments, the SRE may destabilize the payload by a destabilization ratio between 0 and 0.09, wherein the destabilization ratio may comprise the ratio of expression, function or level of the payload of interest in the absence of the stimulus specific to the SRE to the expression, function or level of the payload of interest that is expressed constitutively, and in the absence of the stimulus specific to the SRE.

### Payloads

[0112] As used herein a “payload” or “target payload” or “payload of interest (POI)” is defined as any protein or nucleic acid whose function is to be altered.

[0113] Payloads may include any coding or non-coding gene or any protein or fragment thereof.

[0114] Payloads are often associated with one or more SREs and may be encoded alone or in combination with one or more SRE in a polynucleotide of the disclosure. Payloads themselves may be altered (at the protein or nucleic acid level) thereby providing for an added layer of tenability of the effector module. For example, payloads may be engineered or designed to contain mutations, single or multiple, which affect the stability of the payload or its susceptibility to degradation, cleavage or trafficking. The combination of an SRE which can have a spectrum of responses to a stimulus with a payload which is altered to exhibit a variety of responses or gradations of output signals, e.g., expression levels, produce biocircuits which are superior to those in the art. The ability to independently tune both the SRE and the payload greatly increases the scope of uses of the effector modules of the present disclosure.

[0115] As used herein, the phrase “derived from” as it relates to effector modules, SRE's or payloads means that the effector module, SRE or payload originates at least in part from the stated parent molecule or sequence. For example, in designing an SRE, such SRE may be derived from an epitope or region of a naturally occurring protein but then have been modified in any of the ways taught herein to optimize the SRE function.

[0116] In one embodiment, the payload is derived from a region of parent protein or from a mutant protein. The region of the parent protein may be 10, 11, 12, 13, 14, 15, 16, 17, 18, 19, 20, 21, 22, 23, 24, 25, 26, 27, 28, 29, 30, 31, 32, 33, 34, 35, 36, 37, 38, 39, 40, 41, 42, 43, 44, 45, 46, 47, 48, 49, 50, 51, 52, 53, 54, 55, 56, 57, 58, 59, 60, 61, 62, 63, 64, 65, 66, 67, 68, 69, 70, 71, 72, 73, 74, 75, 76, 77, 78, 79, 80, 81, 82, 83, 84, 85, 86, 87, 88, 89, 90, 91, 92, 93, 94, 95, 96, 97, 98, 99, 100, 101, 102, 103, 104, 105, 106, 107, 108, 109, 110, 111, 112, 113, 114, 115, 116, 117, 118, 119, 120, 121, 122, 123, 124, 125, 126, 127, 128, 129, 130, 131, 132, 133, 134, 135, 136, 137, 138, 139, 140, 141, 142, 143, 144, 145, 146, 147, 148, 149, 150, 151, 152, 153, 154, 155, 156, 157, 158, 159, 160, 161, 162, 163, 164, 165, 166, 167, 168, 169, 170, 171, 172, 173, 174, 175, 176, 177, 178, 179, 180, 181, 182, 183, 184, 185, 186, 187, 188, 189, 190, 191, 192, 193, 194, 195, 196, 197, 198, 199, 200, 201, 202, 203, 204, 205, 206, 207, 208, 209, 210, 211, 212, 213, 214, 215, 216, 217, 218, 219, 220, 221, 222, 223, 224, 225, 226, 227, 228, 229, 230, 231, 232, 233, 234, 235, 236, 237, 238, 239, 240, 241, 242, 243, 244, 245, 246, 247, 248, 249, 250, 251, 252, 253, 254, 255, 256, 257, 258, 259, 260, 261, 262, 263, 264, 265, 266, 267, 268, 269, 270, 271, 272, 273, 274, 275, 276, 277, 278, 279, 280, 281, 282, 283, 284, 285, 286, 287, 288, 289, 290, 291, 292, 293, 294, 295, 296, 297, 298, 299, 300, 301, 302, 303, 304, 305, 306, 307, 308, 309, 310, 311, 312, 313, 314, 315, 316, 317, 318, 319, 320, 321, 322, 323, 324, 325, 326, 327, 328, 329, 330, 331, 332, 333, 334, 335, 336, 337, 338, 339, 340, 341, 342, 343, 344, 345, 346, 347, 348, 349, 350, 351, 352, 353, 354, 355, 356, 357, 358, 359, 360, 361, 362, 363, 364, 365, 366, 367, 368, 369, 370, 371, 372, 373, 374, 375, 376, 377, 378, 379, 380, 381, 382, 383, 384, 385, 386, 387, 388, 389, 390, 391, 392, 393, 394, 395, 396, 397, 398, 399, 400, 401, 402, 403, 404, 405, 406, 407, 408, 409, 410, 411, 412, 413, 414, 415, 416, 417, 418, 419, 420, 421, 422, 423, 424, 425, 426, 427, 428, 429, 430, 431, 432, 433, 434, 435, 436, 437, 438, 439, 440, 441, 442, 443, 444, 445, 446, 447, 448, 449, 450, or more than 450 amino acids in length. The region of the parent protein may be 5-50, 25-75, 50-100, 75-125, 100-150, 125-175, 150-200, 175-225, 200-250, 225-275, 250-300, 275-325, 300-350, 325-375, 350-400, 375-425, or 400-450 amino acids in length.

[0117] In one embodiment, the payload is derived from a region of parent protein or from a mutant protein and includes a region of the parent protein. The payload may include a region of the parent protein which is 1%, 5%, 10%, 15%, 20%, 25%, 30%, 35%, 40%, 45%, 50%, 55%, 60%, 65%, 70%, 75%, 80%, 85%, 90%, 95%, 99%, or 100%, 5-10%, 10-15%, 15-20%, 20-25%, 25-30%, 30-35%, 35-40%, 40-45%, 45-50%, 50-55%, 55-60%, 60-65%, 65-70%, 70-75%, 75-80%, 80-85%, 85-90%, 90-95%, 95-100%, 10-20%, 20-30%, 30-40%, 40-50%, 50-60%, 60-70%, 70-80%, 80-90%, 90-100%, 10-30%, 20-40%, 30-50%, 40-60%, 50-70%, 60-80%, 70-90%, 80-100%, 10-40%, 20-50%, 30-60%, 40-70%, 50-80%, 60-90%, 70-100%, 10-50%, 20-60%, 30-70%, 40-80%, 50-90%, 60-100%, 10-60%, 20-70%, 30-80%, 40-90%, 50-100%, 10-70%, 20-80%, 30-90%, 40-100%, 10-80%, 20-90%, 30-100%, 10-90%, 20-100%, 25-50%, 50-75%, or 75-100% of the parent protein or mutant protein.

[0118] In one embodiment, the payload is derived from a parent protein or from a mutant protein and may have 1%, 5%, 10%, 15%, 20%, 25%, 30%, 35%, 40%, 45%, 50%, 55%, 60%, 65%, 70%, 75%, 80%, 85%, 90%, 95%, 99%, or 100%, 5-10%, 10-15%, 15-20%, 20-25%, 25-30%, 30-35%, 35-40%, 40-45%, 45-50%, 50-55%, 55-60%, 60-65%, 65-70%, 70-75%, 75-80%, 80-85%, 85-90%, 90-95%, 95-100%, 10-20%, 20-30%, 30-40%, 40-50%, 50-60%, 60-70%, 70-80%, 80-90%, 90-100%, 10-30%, 20-40%, 30-50%, 40-60%, 50-70%, 60-80%, 70-90%, 80-100%, 10-40%, 20-50%, 30-60%, 40-70%, 50-80%, 60-90%, 70-100%, 10-50%, 20-60%, 30-70%, 40-80%, 50-90%, 60-100%, 10-60%, 20-70%, 30-80%, 40-90%, 50-100%, 10-70%, 20-80%, 30-90%, 40-100%, 10-80%, 20-90%, 30-100%, 10-90%, 20-100%, 25-50%, 50-75%, or 75-100% identity to the parent protein or mutant protein.

[0119] In one embodiment, the transmembrane domain region of a first payload may be replaced with a transmembrane domain, variant or fragment thereof, from a second parent protein.

### Polypeptides and Polypeptides as Payloads

[0120] The stimuli, biocircuit components, effector modules, including their SREs and payloads of the present disclosure may exist as a whole polypeptide, a plurality of polypeptides or fragments of polypeptides, which independently may be encoded by one or more nucleic acids, a plurality of nucleic acids, fragments of nucleic acids or variants of any of the aforementioned.

[0121] As used herein, the term “polypeptide” refers to a polymer of amino acid residues (natural or unnatural) linked together most often by peptide bonds. The term, as used herein, refers to proteins, polypeptides, and peptides of any size, structure, or function. In some instances, the polypeptide encoded is smaller than about 50 amino acids and the polypeptide is then termed a peptide. If the polypeptide is a peptide, it will be at least about 2, 3, 4, or at least 5 amino acid residues long. Thus, polypeptides include gene products, naturally occurring polypeptides, synthetic polypeptides, homologs, orthologs, paralogs, fragments and other equivalents, variants, and analogs of the foregoing. A polypeptide may be a single molecule or may be a multi-molecular complex such as a dimer, trimer or tetramer. They may also comprise single chain or multichain polypeptides and may be associated or linked. The term polypeptide may also apply to amino acid polymers in which one or more amino acid residues are an artificial chemical analogue of a corresponding naturally occurring amino acid.

[0122] As used herein, the term “polypeptide variant” refers to molecules which differ in their amino acid sequence from a native or reference sequence. The amino acid sequence variants may possess substitutions, deletions, and/or insertions at certain positions within the amino acid sequence, as compared to a native or reference sequence. Ordinarily, variants will possess at least about 50% identity (homology) to a native or reference sequence, and preferably, they will be at least about 80%, more preferably at least about 90% identical (homologous) to a native or reference sequence.

[0123] In some embodiments “variant mimics” are provided. As used herein, the term “variant mimic” refers to a variant which contains one or more amino acids which would mimic an activated sequence. For example, glutamate may serve as a mimic for phospho-threonine and/or phospho-serine. Alternatively, variant mimics may result in deactivation or in an inactivated product containing the mimic, e.g., phenylalanine may act as an inactivating substitution for tyrosine; or alanine may act as an inactivating substitution for serine. The amino acid sequences of the pharmaceutical compositions, biocircuits, biocircuit components, effector modules including their SREs or payloads of the disclosure may comprise naturally occurring amino acids and as such may be considered to be proteins, peptides, polypeptides, or fragments thereof. Alternatively, the pharmaceutical compositions, biocircuits, biocircuit components, effector modules including their SREs or payloads may comprise both naturally and non-naturally occurring amino acids.

[0124] As used herein, the term “amino acid sequence variant” refers to molecules with some differences in their amino acid sequences as compared to a native or starting sequence. The amino acid sequence variants may possess substitutions, deletions, and/or insertions at certain positions within the amino acid sequence. As used herein, the terms “native” or “starting” when referring to sequences are relative terms referring to an original molecule against which a comparison may be made. Native or starting sequences should not be confused with wild type sequences. Native sequences or molecules may represent the wild-type (that sequence found in nature) but do not have to be identical to the wild-type sequence.

[0125] Ordinarily, variants will possess at least about 70% homology to a native sequence, and preferably, they will be at least about 80%, more preferably at least about 90% homologous to a native sequence.

[0126] As used herein, the term “homology” as it applies to amino acid sequences is defined as the percentage of residues in the candidate amino acid sequence that are identical with the residues in the amino acid sequence of a second sequence after aligning the sequences and introducing gaps, if necessary, to achieve the maximum percent homology. Methods and computer programs for the alignment are well known in the art. It is understood that homology depends on a calculation of percent identity but may differ in value due to gaps and penalties introduced in the calculation.

[0127] As used herein, the term “homolog” as it applies to amino acid sequences is meant the corresponding sequence of other species having substantial identity to a second sequence of a second species.

[0128] As used herein, the term “analog” is meant to include polypeptide variants which differ by one or more amino acid alterations, e.g., substitutions, additions or deletions of amino acid residues that still maintain the properties of the parent polypeptide.

[0129] As used herein, the term “derivative” is used synonymously with the term “variant” and refers to a molecule that has been modified or changed in any way relative to a reference molecule or starting molecule.

[0130] The present disclosure contemplates several types of pharmaceutical compositions, biocircuits, biocircuit components, effector modules including their SREs or payloads which are amino acid based including variants and derivatives. These include substitutional, insertional, deletional and covalent variants and derivatives. As such, included within the scope of this disclosure are pharmaceutical compositions, biocircuits, biocircuit components, effector modules including their SREs or payloads comprising substitutions, insertions, additions, deletions and/or covalent modifications. For example, sequence tags or amino acids, such as one or more lysines, can be added to peptide sequences of the disclosure (e.g., at the N-terminal or C-terminal ends). Sequence tags can be used for peptide purification or localization. Lysines can be used to increase peptide solubility or to allow for biotinylation. Alternatively, amino acid residues located at the carboxy and amino terminal regions of the amino acid sequence of a peptide or protein may optionally be deleted providing for truncated sequences. Certain amino acids (e.g., C-terminal or N-terminal residues) may alternatively be deleted depending on the use of the sequence, as for example, expression of the sequence as part of a larger sequence which is soluble or linked to a solid support.

[0131] “Substitutional variants” when referring to proteins are those that have at least one amino acid residue in a native or starting sequence removed and a different amino acid inserted in its place at the same position. The substitutions may be single, where only one amino acid in the molecule has been substituted, or they may be multiple, where two or more amino acids have been substituted in the same molecule.

[0132] As used herein, the term “conservative amino acid substitution” refers to the substitution of an amino acid that is normally present in the sequence with a different amino acid of similar size, charge, or polarity. Examples of conservative substitutions include the substitution of a non-polar (hydrophobic) residue such as isoleucine, valine and leucine for another non-polar residue. Likewise, examples of conservative substitutions include the substitution of one polar (hydrophilic) residue for another such as between arginine and lysine, between glutamine and asparagine, and between glycine and serine. Additionally, the substitution of a basic residue such as lysine, arginine or histidine for another, or the substitution of one acidic residue such as aspartic acid or glutamic acid for another acidic residue are additional examples of conservative substitutions. Examples of non-conservative substitutions include the substitution of a non-polar (hydrophobic) amino acid residue such as isoleucine, valine, leucine, alanine, methionine for a polar (hydrophilic) residue such as cysteine, glutamine, glutamic acid or lysine and/or a polar residue for a non-polar residue.

[0133] As used herein, the term “insertional variants” when referring to proteins are those with one or more amino acids inserted immediately adjacent to an amino acid at a particular position in a native or starting sequence. As used herein, the term “immediately adjacent” refers to an adjacent amino acid that is connected to either the alpha-carboxy or alpha-amino functional group of a starting or reference amino acid.

[0134] As used herein, the term “deletional variants” when referring to proteins, are those with one or more amino acids in the native or starting amino acid sequence removed. Ordinarily, deletional variants will have one or more amino acids deleted in a particular region of the molecule.

[0135] As used herein, the term “derivatives,” as referred to herein includes variants of a native or starting protein comprising one or more modifications with organic proteinaceous or non-proteinaceous derivatizing agents, and post-translational modifications. Covalent modifications are traditionally introduced by reacting targeted amino acid residues of the protein with an organic derivatizing agent that is capable of reacting with selected side-chains or terminal residues, or by harnessing mechanisms of post-translational modifications that function in selected recombinant host cells. The resultant covalent derivatives are useful in programs directed at identifying residues important for biological activity, for immunoassays, or for the preparation of anti-protein antibodies for immunoaffinity purification of the recombinant glycoprotein. Such modifications are within the ordinary skill in the art and are performed without undue experimentation.

[0136] As used herein, the terms “site,” as it pertains to amino acid-based embodiments is used synonymously with “amino acid residue” and “amino acid side chain”. A site represents a position within a peptide or polypeptide that may be modified, manipulated, altered, derivatized or varied within the polypeptide-based molecules of the present disclosure.

[0137] As used herein, the terms “termini” or “terminus,” when referring to proteins refers to an extremity of a peptide or polypeptide. Such extremity is not limited only to the first or final site of the peptide or polypeptide but may include additional amino acids in the terminal regions. The polypeptide-based molecules of the present disclosure may be characterized as having both an N-terminus (terminated by an amino acid with a free amino group (NH2)) and a C-terminus (terminated by an amino acid with a free carboxyl group (COOH)).

[0138] Polypeptides or proteins of the disclosure are in some cases made up of multiple polypeptide chains brought together by disulfide bonds or by non-covalent forces (multimers, oligomers). These sorts of proteins will have multiple N- and C-termini. Alternatively, the termini of the polypeptides may be modified such that they begin or end, as the case may be, with a non-polypeptide-based moiety such as an organic conjugate.

[0139] Once any of the features have been identified or defined as a component of a biocircuit system component, stimulus, effector module including the SREs or payloads of the disclosure, any of several manipulations and/or modifications of these features may be performed by moving, swapping, inverting, deleting, randomizing or duplicating. Furthermore, it is understood that manipulation of features may result in the same outcome as a modification to the compositions of the disclosure. For example, a manipulation which involved deleting a domain would result in the alteration of the length of a molecule just as modification of a nucleic acid to encode less than a full-length molecule would.

[0140] Modifications and manipulations can be accomplished by methods known in the art such as site directed mutagenesis. The resulting modified molecules may then be tested for activity using in vitro or in vivo assays such as those described herein, or any other suitable screening assay known in the art.

[0141] In some embodiments, compositions of the present disclosure may comprise one or more atoms that are isotopes. As used herein, the term “isotope” refers to a chemical element that has one or more additional neutrons. In some embodiments, compounds of the present disclosure may be deuterated. As used herein, the term “deuterate” refers to the process of replacing one or more hydrogen atoms in a substance with deuterium isotopes. Deuterium isotopes are isotopes of hydrogen. The nucleus of hydrogen contains one proton while deuterium nuclei contain both a proton and a neutron. The pharmaceutical compositions, biocircuits, biocircuit components, effector modules including their SREs or payloads of the present disclosure may be deuterated in order to change one or more physical property, such as stability, or to allow pharmaceutical compositions, biocircuits, biocircuit components, effector modules including their SREs or payloads to be used in diagnostic and/or experimental applications.

[0142] At the protein level, any of the biocircuit components may comprise one or more post-translational modifications (PTM). Such PTMs may occur intracellularly after administration of a protein-based biocircuit component or upon or after translation of a biocircuit component administered as a nucleic acid encoding said biocircuit component.

[0143] Post translational modifications (PTMs) of the present disclosure include, but are not limited to acetylation, phosphorylation, ubiquitination, carboxylation, deamidation, deamination, deacetylation, dihydroxylation, dephosphorylation, formylation, gamma-carboxyglutamation, glutathionylation, glycation, hydroxylation, methylation, nitration, sumoylation, N- or O-transglutamination, glycosylation and farnesylation.

[0144] Effector modules, including their SREs and payloads, may independently have 1, 2, 3, 4, 5, 6, 7, 8, 9, 10 or more PTMs which are the same or different.

[0145] Effector modules may be designed to include one or more structural or functional domain, repeat, or motif of a protein family. Such domains, repeats and motifs are categorized by protein family; and representative families are given in the EMBL-EBI database, located at http://www.ebi.ac.uk/.

[0146] In some embodiments, protein modifications engineered into the structure of the compositions of the disclosure to interfere with antigen processing and peptide loading such as glycosylation and PEGylation, may also be useful in the present disclosure. Compositions of the disclosure may also be engineered to include non-classical amino acid sidechains to design less immunogenic compositions. Any of the methods discussed in International Patent Publication No. WO2005051975 for reducing immunogenicity may be useful in the present disclosure (the contents of which are incorporated by reference in their entirety).

[0147] The SRE may be, but is not limited to, a peptide, peptide complex, peptide-protein complex, protein, fusion protein, protein complex, protein-protein complex. The SRE may include one or more regions derived from any natural or mutated protein, or antibody. In this aspect, the SRE is an element, when responding to a stimulus, can tune intracellular localization, intramolecular activation, and/or degradation of payloads.

[0148] In some embodiments, effector modules of the present disclosure may comprise additional features that facilitate the expression and regulation of the effector module, such as one or more signal sequences (SSs), one or more cleavage and/or processing sites, one or more targeting and/or penetrating peptides, one or more tags, and/or one or more linkers. Additionally, effector modules of the present disclosure may further comprise other regulatory moieties such as inducible promoters, enhancer sequences, microRNA sites, and/or microRNA targeting sites. Each aspect or tuned modality may bring to the effector module or biocircuit a differentially tuned feature. For example, an SRE may represent a destabilizing domain, while mutations in the protein payload may alter its cleavage sites or dimerization properties or half-life and the inclusion of one or more microRNA or microRNA binding site may impart cellular detargeting or trafficking features. Consequently, the present disclosure embraces biocircuits which are multifactorial in their tenability. Such biocircuits may be engineered to contain one, two, three, four or more tuned features.

[0149] In some embodiments, effector modules of the present disclosure may include one or more degrons to tune expression. As used herein, a “degron” refers to a minimal sequence within a protein that is sufficient for the recognition and the degradation by the proteolytic system. An important property of degrons is that they are transferrable, that is, appending a degron to a sequence confers degradation upon the sequence. In some embodiments, the degron may be appended to the destabilizing domains, the payload or both. Incorporation of the degron within the effector module of the disclosure, confers additional protein instability to the effector module and may be used to minimize basal expression. In some embodiments, the degron may be an N degron, a phospho degron, a heat inducible degron, a photosensitive degron, an oxygen dependent degron. As a non-limiting example, the degron may be an Ornithine decarboxylase degron as described by Takeuchi et al. (Takeuchi J et al. (2008). Biochem J. 2008 Mar. 1; 410(2):401-7; the contents of which are incorporated by reference in their entirety). Other examples of degrons useful in the present disclosure include degrons described in International patent publication Nos. WO2017004022, WO2016210343, and WO2011062962; the contents of each of which are incorporated by reference in their entirety.

### Immunotherapeutic Agents

[0150] In some embodiments, payloads of the present disclosure may be immunotherapeutic agents that induce immune responses in an organism. The immunotherapeutic agent may be a co-stimulatory molecule such as CD40L and fragments and variants thereof. In one embodiment, the immunotherapeutic agent induces an anti-cancer immune response in a cell, or in a subject.

[0151] In some embodiments, payloads of the present disclosure may comprise whole or a portion of human CD40L WT (SEQ ID NO. 6; Uniprot ID: P29965). As used herein the term “CD40L WT”, refers to the human wild-type CD40L protein sequence, which is defined as SEQ ID NO. 6, with accession number P29965, having the amino acid sequence: MIETYNQTSPRSAATGLPISMKIFMYLLTVFLITQMIGSALFAVYLHRRLDKIEDERNLH EDFVFMKTIQRCNTGERSLSLLNCEEIKSQFEGFVKDIMLNKEETKKENSFEMQKGDQNPQIAAHVISEASSKTTS VLQWAEKGYYTMSNNLVTLENGKQLTVKRQGLYYIYAQVTFCSNREASSQAPFIASLCLKSPGRFERILLRAAN THSSAKPCGQQSIHLGGVFELQPGASVFVN VTDPSQVSHGTGFTSFGLLKL.

### Cytokines and Co-Stimulatory Molecules

[0152] In some embodiments, payloads of the present disclosure may be cytokines, and fragments, variants, analogs and derivatives thereof, including but not limited to interleukins, tumor necrosis factors (TNFs), interferons (IFNs), TGF beta and chemokines. It is understood in the art that certain gene and/or protein nomenclature for the same gene or protein may be inclusive or exclusive of punctuation such as a dash “-” or symbolic such as Greek letters. Whether these are included or excluded herein, the meaning is not meant to be changed as would be understood by one of skill in the art. For example, CD40L, CD40 L and CD40LG refer to the same protein.

[0153] In some embodiments, cytokines of the present disclosure may be utilized to improve expansion, survival, persistence, and potency of immune cells such as CD8+ TEM, natural killer cells and tumor infiltrating lymphocytes (TIL) cells used for immunotherapy. In other embodiments, T cells engineered with two or more DD regulated cytokines are utilized to provide kinetic control of T cell activation and tumor microenvironment remodeling. In one aspect, the present disclosure provides biocircuits and compositions to minimize toxicity related to cytokine therapy. Despite its success in mitigating tumor burden, systemic cytokine therapy often results in the development of severe dose limiting side effects. Two factors contribute to the observed toxicity (a) Pleiotropism, wherein cytokines affect different cells types and sometimes produce opposing effects on the same cells depending on the context (b) Cytokines have short serum half-life and thus need to be administered at high doses to achieve therapeutic effects, which exacerbates the pleiotropic effects. In one aspect, cytokines of the present disclosure may be utilized to modulate cytokine expression in the event of adverse effects. In some embodiments, cytokines of the present disclosure may be designed to have prolonged life span or enhanced specificity to minimize toxicity.

[0154] In some embodiments, the immunotherapeutic agent may be CD40L (also referred to as CD154 and TNFSF5). CD40L belongs to the TNF super family and is primarily expressed on T cells. CD40L binds to CD40 expressed on a multitude of immune cells and initiates a cascade of cellular responses depending on the cell type. CD40L may also bind to α5β1 integrin and αIIbβ3 integrins. In some embodiments, the CD40L of the present disclosure may be engineered to bind to only one of its binding partners e.g. CD40. In some aspects, the CD40L described herein may be capable of binding to all of its cognate binding partners.

[0155] CD40L may bind to CD40 expressed in but not limited to Antigen Presenting Cells (APCs), B cells, monocytes, macrophages, platelets, neutrophils, dendritic cells, endothelial cells, and αSMC (smooth muscle cells). Binding of CD40L to CD40 expressed on dendritic cells may promote dendritic cell (DC) licensing. DCs may be converted to a functional state by an antigen-specific T helper cell in order to activate cytotoxic CD8+ T cells, a process referred to as DC licensing. CD40 engagement on DCs results in DC stimulation as evidenced by the surface expression of costimulatory and MHC molecules; proinflammatory cytokine production (e.g. IL12 and TNF) as well as epitope spreading.

[0156] In some embodiments, CD40L regulated by the biocircuit systems described herein may be utilized for the therapy of solid, immunogenic tumors. CD40L may improve the efficacy of solid tumor targeted T cells in immunogenic tumors by activating adaptive and innate immune responses in situ. Regulatable CD40L based biocircuit systems described herein may be desirable since the expression of the endogenous CD40L in T cells is transient. Further, the tumor microenvironment is rich in sheddases that may cleave the endogenous CD40L expressed by T cells. Exogenously expressed constitutive CD40L expression may result in liver toxicity and excessive B cell proliferation resulting in lymphomas (Schmitz et al (2006) Hepatology 44(2):430-9, Vonderheide et al. (2007) J Clin Oncol. 1; 25(7):876-83, Sacco et al (2000) Cancer Gene Ther.; 7(10):1299-306); the contents of each of which are incorporated by reference in their entirety). Constitutive (unregulated) expression may lead to CRS, thromboembolic syndromes, autoimmune reactions, AICD due to hyper-immune stimulation and tumor angiogenesis, thereby creating a need for the biocircuits of the disclosure.

[0157] In some embodiments, the immunotherapeutic agent may be a multimer of CD40L molecules such as but not limited to a dimer, a trimer, a tetramer, a pentamer, a hexamer, a septamer, or a heptamer. In one embodiment, the CD40L may form a trimer. Multimerization of CD40L may enhance the signaling via the CD40L/CD40 axis. Binding of trimeric CD40L to CD40 may also initiate CD40 clustering and TRAF activation ultimately leading to NF-κB activation.

[0158] CD40L described herein may be resistant to proteinases and sheddases such as those found in the tumor microenvironment e.g. ADAM10, or ADAM17. The heightened activity of ADAM17 in the tumor microenvironment has been associated with diminished signaling via the CD40/CD40L axis (see Lowe and Corvaia (2016), Int J Cancer Clin Res, 3:058; the contents of which are incorporated by reference in their entirety).

[0159] CD40L is involved in dendritic cell antigen presentation; production of IL12, and the generation of CD8+ T-cell immunity. Any of the methods described by Curren et al. to enhance antitumor efficacy of CARs using CD40L may be useful in the present disclosure (Curren et al. Mol Ther. 2015 April; 23(4): 769-778; the contents of which are incorporated by reference in their entirety). In one embodiment, agonistic CD40 antibodies may be useful in the present disclosure. CD40 monoclonal antibodies have shown clinical activity in the absence of disabling toxicity.

[0160] In one embodiment, the CD40L immunotherapeutic agent may be derived from UniProt ID: P29965 (also referred to herein as the “WT”). The payloads of the present disclosure may be a region or portion of CD40L. Non-limiting examples of regions of CD40L include but are not limited to amino acids 113-261 of UniProt ID: P29965, wherein the cytoplasmic domain, the transmembrane domain and a portion of the extracellular domain have been removed from UniProt ID: P29965 leaving a portion of the extracellular domain and the receptor binding domain intact. In one embodiment, the payload may be amino acids 14-261 of UniProt ID: P29965, which excludes the cytoplasmic tail of CD40L, thereby may potentially reduce internalization. In one aspect, the payload may be amino acids 14-261 of UniProt ID: P29965 with a deletion in amino acids S110-G116, which renders the CD40L resistant to cleavage by proteolytic enzymes.

[0161] In some embodiments, the mutations may be engineered within CD40L payload such that it does not bind to or bind with reduced affinity to CD40L endogenously expressed by cells described herein. CD40L is a type II transmembrane protein that forms a trimer on the cell surface. In some embodiments, trimerization occurs through the interaction of amino acid residues 47-261 of SEQ ID NO. 6. In some embodiments, residues within 47-261 of SEQ ID NO. 6 may be mutated in the CD40L payload to prevent trimerization (herein referred to as “trimerization mutants.” In some embodiments the residues within 116-261 of SEQ ID NO. 6 may be mutated. In some aspects, mutations may allow selective trimerization such that a CD40L trimerization mutant may be able to bind to another CD40L trimerization mutant protein but not to a CD40L protein lacking the mutations. Trimerization mutations sites may be sites within the CD40L protein that are involved in the trimerization as determined by the crystal structure of the CD40L trimer. Positions within CD40L that may be mutated include but are not limited to amino acids at position 125, 170, 172, 224, 226 and/or 227 of SEQ ID NO. 6. In some embodiments, the mutations to CD40L payload to prevent its trimerization with the endogenous CD40L may include but are not limited to Y170G, Y172G, H224G, G226F, G226H, G226W, and/or G227F.

[0162] Sheddases e.g. ADAM10/17 present in the tumor microenvironment can cleave CD40L thereby preventing the successful activation of CD40 by CD40L. Analysis of the sequence of CD40L reveals an ADAM10/17 proteolytic cleavage site. In some embodiments, a deletion of amino acids 1-13 of CD40L may be engineered to reduce internalization. A deletion of amino acids 110-116 of CD40L may also be designed to remove the ADAM10/17 sites. Deletion or mutation of the methionine residue at amino acid position 113 of CD40L may also be utilized to reduce cleavage by ADAM10/17 enzymes. In one embodiment, a region or portion of the human CD40L protein may be replaced by the murine CD40L protein sequence to generate a CD40L protein that is resistant to cleavage by ADAM10/17. Any of the CD40L sequences aimed at reducing its shedding as described in US Patent Publication US20180085451A1 and/or U.S. Pat. No. 7,495,090B2 may be used in the effector modules and biocircuits described herein (the contents of each of which are incorporated by reference in their entirety). CD40L may be tethered to the membrane using a transmembrane domain. In one embodiment, CD40L may be tethered to the membrane using CD8 derived domains such as but not limited to CD8 transmembrane domain, CD8 hinge domain and/or CD8 cytoplasmic tail.

[0163] In some embodiments the payload may be but are not limited to CD40L (SEQ ID NO. 5-6) and their coding sequences i.e. SEQ ID NO. 11-12 respectively.

### Chimeric Antigen Receptors (CARs)

[0164] In some embodiments, biocircuits of the present disclosure may include chimeric antigen receptors (CARs) which when transduced into immune cells (e.g., T cells and NK cells), can re-direct the immune cells against the target (e.g., a tumor cell) which expresses a molecule recognized by the extracellular target moiety of the CAR.

[0165] As used herein, the term “chimeric antigen receptor (CAR)” refers to a synthetic receptor that mimics the TCR on the surface of T cells. In general, a CAR is composed of an extracellular targeting domain, a transmembrane domain/region and an intracellular signaling/activation domain. In a standard CAR receptor, the components: the extracellular targeting domain, transmembrane domain and intracellular signaling/activation domain, are linearly constructed as a single fusion protein. The extracellular region comprises a targeting domain/moiety (e.g., a scFv) that recognizes a specific tumor antigen or other tumor cell-surface molecules. The intracellular region may contain a signaling domain of TCR complex (e.g., the signal region of CD3ζ, and/or one or more costimulatory signaling domains, such as those from CD28, 4-1BB (CD137) and OX-40 (CD134). For example, a “first-generation CAR” only has the CD3ζ signaling domain. In an effort to augment T-cell persistence and proliferation, costimulatory intracellular domains are added, giving rise to second generation CARs having a CD3ζ signal domain plus one costimulatory signaling domain, and third generation CARs having CD3ζ signal domain plus two or more costimulatory signaling domains. A CAR, when expressed by a T cell, endows the T cell with antigen specificity determined by the extracellular targeting moiety of the CAR. Recently, it is also desirable to add one or more elements such as homing and suicide genes to develop a more competent and safer architecture of CAR, so called the fourth-generation CAR.

[0166] In some embodiments, the immunotherapeutic agent of the effector module is a chimeric antigen receptor (CAR). The chimeric antigen may comprise an extracellular target moiety; a transmembrane domain; an intracellular signaling domain; and optionally, one or more co-stimulatory domains.

[0167] In some embodiments, the extracellular targeting domain is joined through the hinge (also called space domain or spacer) and transmembrane regions to an intracellular signaling domain. The hinge connects the extracellular targeting domain to the transmembrane domain which transverses the cell membrane and connects to the intracellular signaling domain. The hinge may need to be varied to optimize the potency of CAR expressing cells toward cancer cells due to the size of the target protein where the targeting moiety binds, and the size and affinity of the targeting domain itself. Upon recognition and binding of the targeting moiety to the target cell, the intracellular signaling domain leads to an activation signal for the CAR T cell, which is further amplified by the “second signal” from one or more intracellular costimulatory domains. The CAR T cell, once activated, can destroy the target cell.

[0168] In some embodiments, the CAR of the present disclosure may be split into two parts, each part is linked to a dimerizing domain, such that an input that triggers the dimerization promotes assembly of the intact functional receptor. Wu and Lim recently reported a split CAR in which the extracellular CD19 binding domain and the intracellular signaling element are separated and linked to the FKBP domain and the FRB* (T2089L mutant of FKBP-rapamycin binding) domain that heterodimerize in the presence of the rapamycin analog AP21967. The split receptor is assembled in the presence of AP21967 and together with the specific antigen binding, activates T cells (Wu et al., Science, 2015, 625(6258): aab4077).

[0169] In some embodiments, the CAR of the present disclosure may be designed as an inducible CAR. Sakemura et al recently reported the incorporation of a Tet-On inducible system to the CD19 CAR construct. The CD19 CAR is activated only in the presence of doxycycline (Dox). Sakemura reported that Tet-CD19CAR T cells in the presence of Dox were equivalently cytotoxic against CD19+ cell lines and had equivalent cytokine production and proliferation upon CD19 stimulation, compared with conventional CD19CAR T cells (Sakemura et al., Cancer Immuno. Res., 2016 Jun. 21, Epub ahead of print). In one example, the biocircuit may include a Tet-CAR. In another example, a Tet-CAR may be the payload of the CA2 effector module under the control of SREs (e.g., CA2 DDs) described herein. The dual systems provide more flexibility to turn-on and off the CAR expression in transduced T cells.

[0170] According to the present disclosure, the CAR may be a first-generation CAR, or a second-generation CAR, or a third-generation CAR, or a fourth-generation CAR. In some embodiments, the payload of the present disclosure may be a full CAR construct composed of the extracellular domain, the hinge and transmembrane domain and the intracellular signaling region. In other embodiments, a component of the full CAR construct including an extracellular targeting moiety, a hinge region, a transmembrane domain, an intracellular signaling domain, one or more co-stimulatory domain, and other additional elements that improve CAR architecture and functionality including but not limited to a leader sequence, a homing element and a safety switch, or the combination of such components may be included in the biocircuits.

### Extracellular Targeting Domain/Moiety

[0171] In accordance with the disclosure, the extracellular target moiety of a CAR may be any agent that recognizes and binds to a given target molecule, for example, a neoantigen on tumor cells, with high specificity and affinity. The target moiety may be an antibody and variants thereof that specifically binds to a target molecule on tumor cells, or a peptide aptamer selected from a random sequence pool based on its ability to bind to the target molecule on tumor cells, or a variant or fragment thereof that can bind to the target molecule on tumor cells, or an antigen recognition domain from native T-cell receptor (TCR) (e.g. CD4 extracellular domain to recognize HIV infected cells), or exotic recognition components such as a linked cytokine that leads to recognition of target cells bearing the cytokine receptor, or a natural ligand of a receptor.

[0172] In some embodiments, the targeting domain of a CAR may be a Ig NAR, a Fab fragment, a Fab′ fragment, a F(ab)′2 fragment, a F(ab)′3 fragment, Fv, a single chain variable fragment (scFv), a bis-scFv, a (scFv)2, a minibody, a diabody, a tribody, a tetrabody, a disulfide stabilized Fv protein (dsFv), a unibody, a nanobody, or an antigen binding region derived from an antibody that specifically recognizes a target molecule, for example a tumor specific antigen (TSA). In one embodiment, the targeting moiety is a scFv. The scFv domain, when it is expressed on the surface of a CAR T cell and subsequently binds to a target protein on a cancer cell, is able to maintain the CAR T cell in proximity to the cancer cell and to trigger the activation of the T cell. A scFv can be generated using routine recombinant DNA technology techniques and is discussed in the present disclosure.

[0173] In one embodiment, the targeting moiety of the CAR may recognize CD19. CD19 is a well-known B cell surface molecule, which upon B cell receptor activation enhances B-cell antigen receptor induced signaling and expansion of B cell populations. CD19 is broadly expressed in both normal and neoplastic B cells. Malignancies derived from B cells such as chronic lymphocytic leukemia, acute lymphocytic leukemia and many non-Hodgkin lymphomas frequently retain CD19 expression. This near universal expression and specificity for a single cell lineage has made CD19 an attractive target for immunotherapies. Human CD19 has 14 exons wherein exon 1-4 encode the extracellular portion of the CD19, exon 5 encodes the transmembrane portion of CD19 and exons 6-14 encode the cytoplasmic tail. In one embodiment, the targeting moiety may comprise scFvs derived from the variable regions of the FMC63 antibody. FMC63 is an IgG2a mouse monoclonal antibody clone specific to the CD19 antigen that reacts with CD19 antigen on cells of the B lineage. The epitope of CD19 recognized by the FMC63 antibody is in exon 2 (Sotillo et al (2015) Cancer Discov; 5(12):1282-95; the contents of which are incorporated by reference in their entirety). In some embodiments, the targeting moiety of the CAR may be derived from the variable regions of other CD19 monoclonal antibody clones including but not limited to 4G7, SJ25C1, CVID3/429, CVID3/155, HIB19, and J3-119.

[0174] In one aspect, the extracellular target moiety may be an scFv derived from an antibody. In one aspect, the scFv may specifically bind to a CD19 antigen.

### Intracellular Signaling Domains

[0175] The intracellular domain of a CAR fusion polypeptide, after binding to its target molecule, transmits a signal to the effector immune cell, activating at least one of the normal effector functions of effector immune cells, including cytolytic activity (e.g., cytokine secretion) or helper activity. Therefore, the intracellular domain comprises an “intracellular signaling domain” of a T cell receptor (TCR).

[0176] In some aspects, the entire intracellular signaling domain can be employed. In other aspects, a truncated portion of the intracellular signaling domain may be used in place of the intact chain as long as it transduces the effector function signal.

[0177] In some embodiments, the intracellular signaling domain of the present disclosure may contain signaling motifs which are known as immunoreceptor tyrosine-based activation motifs (ITAMs). Examples of ITAM containing cytoplasmic signaling sequences include those derived from TCR CD3zeta, FcR gamma, FcR beta, CD3 gamma, CD3 delta, CD3 epsilon, CD5, CD22, CD79a, CD79b, and CD66d. In one example, the intracellular signaling domain is a CD3 zeta (CD3ζ) signaling domain.

[0178] In some embodiments, the intracellular region of the present disclosure further comprises one or more costimulatory signaling domains which provide additional signals to the effector immune cells. These costimulatory signaling domains, in combination with the signaling domain can further improve expansion, activation, memory, persistence, and tumor-eradicating efficiency of CAR engineered immune cells (e.g., CAR T cells). In some cases, the costimulatory signaling region contains 1, 2, 3, or 4 cytoplasmic domains of one or more intracellular signaling and/or costimulatory molecules. The costimulatory signaling domain may be the intracellular/cytoplasmic domain of a costimulatory molecule, including but not limited to CD2, CD7, CD27, CD28, 4-1BB (CD137), OX40 (CD134), CD30, CD40, ICOS (CD278), GITR (glucocorticoid-induced tumor necrosis factor receptor), LFA-1 (lymphocyte function-associated antigen-1), LIGHT, NKG2C, B7-H3. In one example, the costimulatory signaling domain is derived from the cytoplasmic domain of CD28. In another example, the costimulatory signaling domain is derived from the cytoplasmic domain of 4-1BB (CD137). In another example, the co-stimulatory signaling domain may be an intracellular domain of GITR as taught in U.S. Pat. No. 9,175,308; the contents of which are incorporated herein by reference in its entirety. Transmembrane domains and hinge regions

[0179] In some embodiments, the CAR of the present disclosure may comprise a transmembrane domain. As used herein, the term “Transmembrane domain (TM)” refers broadly to an amino acid sequence of about 15 residues in length which spans the plasma membrane. More preferably, a transmembrane domain includes at least 20, 21, 22, 23, 24, 25, 26, 27, 28, 29, 30, 31, 32, 33, 34, 35, 36, 37, 38, 39, 40, 41, 42, 43, 44, or 45 amino acid residues and spans the plasma membrane. In some embodiments, the transmembrane domain of the present disclosure may be derived either from a natural or from a synthetic source. The transmembrane domain of a CAR may be derived from any naturally membrane-bound or transmembrane protein. For example, the transmembrane region may be derived from (i.e. comprise at least the transmembrane region(s) of) the alpha, beta or zeta chain of the T-cell receptor, CD3 epsilon, CD4, CD5, CD8, CD8a, CD9, CD16, CD22, CD33, CD28, CD37, CD45, CD64, CD80, CD86, CD134, CD137, CD152, or CD154. In some embodiments, the transmembrane domain of the present disclosure may be selected from the group consisting of a CD8a transmembrane domain, a CD4 transmembrane domain, a CD 28 transmembrane domain, a CTLA-4 transmembrane domain, a PD-1 transmembrane domain, and a human IgG4 Fc region.

[0180] Alternatively, the transmembrane domain of the present disclosure may be synthetic. In some aspects, the synthetic sequence may comprise predominantly hydrophobic residues such as leucine and valine.

[0181] In some embodiments, the transmembrane domain of the present disclosure may be selected from the group consisting of a CD8a transmembrane domain, a CD4 transmembrane domain, a CD 28 transmembrane domain, a CTLA-4 transmembrane domain, a PD-1 transmembrane domain, and a human IgG4 Fc region. As non-limiting examples, the transmembrane domain may be a CTLA-4 transmembrane domain comprising the amino acid sequences of SEQ ID NOs. 1-5 of International Patent Publication NO. WO2014/100385; and a PD-1 transmembrane domain comprising the amino acid sequences of SEQ ID NOs. 6-8 of International Patent Publication NO. WO2014100385; the contents of each of which are incorporated herein by reference in their entirety.

[0182] In some embodiments, the CAR of the present disclosure may comprise an optional hinge region (also called spacer). A hinge sequence is a short sequence of amino acids that facilitates flexibility of the extracellular targeting domain that moves the target binding domain away from the effector cell surface to enable proper cell/cell contact, target binding and effector cell activation (Patel et al., Gene Therapy, 1999; 6: 412-419). The hinge sequence may be positioned between the targeting moiety and the transmembrane domain.

[0183] In some embodiments, the CAR of the present disclosure may comprise one or more linkers between any of the domains of the CAR. The linker may be between 1-30 amino acids long.

[0184] In some embodiments, the components including the targeting moiety, transmembrane domain and intracellular signaling domains of the present invention may be constructed in a single fusion polypeptide.

[0185] In one embodiment, the CAR construct comprises a CD19 scFv (e.g., CAT13.1E10 or FMC63), a CD8a spacer or transmembrane domain, and a 4-1BB and CD3ζ endodomain. These constructs with CAT13.1E10 may have increased proliferation after stimulation in vitro, increased cytotoxicity against the CD19+ targets, and increased effector and target interactions as compared to constructs with FMC63.

[0186] In some embodiments, the payload of the disclosure may be any of the co-stimulatory molecules and/or intracellular domains described herein. In some embodiments, one or more co-stimulatory molecules, each under the control of different SRE may be used in the present disclosure. SRE regulated co-stimulatory molecules may also be expressed in conjunction with a first-generation CAR, a second-generation CAR, a third generation CAR, a fourth generation, or any other CAR design described herein.

### Tandem CAR (TanCAR)

[0187] In some embodiments, the CAR of the present disclosure may be a tandem chimeric antigen receptor (TanCAR) which is able to target two, three, four, or more tumor specific antigens. In some aspects, the CAR is a bispecific TanCAR including two targeting domains which recognize two different TSAs on tumor cells. The bispecific CAR may be further defined as comprising an extracellular region comprising a targeting domain (e.g., an antigen recognition domain) specific for a first tumor antigen and a targeting domain (e.g., an antigen recognition domain) specific for a second tumor antigen. In other aspects, the CAR is a multispecific TanCAR that includes three or more targeting domains configured in a tandem arrangement. The space between the targeting domains in the TanCAR may be between about 5 and about 30 amino acids in length, for example, 6, 7, 8, 9, 10, 11, 12, 13, 14, 15, 16, 17, 18, 19, 20, 21, 22, 23, 24, 25, 26, 27, 28, 29 and 30 amino acids.

### Split CAR

[0188] In some embodiments, the components including the targeting moiety, transmembrane domain and intracellular signaling domains of the present disclosure may be split into two or more parts such that it is dependent on multiple inputs that promote assembly of the intact functional receptor. In one embodiment, the split synthetic CAR system can be constructed in which the assembly of an activated CAR receptor is dependent on the binding of a ligand to the SRE (e.g. a small molecule) and a specific antigen to the targeting moiety. As a non-limiting example, the split CAR consists of two parts that assemble in a small molecule-dependent manner; one part of the receptor features an extracellular antigen binding domain (e.g. scFv) and the other part has the intracellular signaling domains, such as the CD3ζ intracellular domain.

[0189] In other aspects, the split parts of the CAR system can be further modified to increase signal. In one example, the second part of cytoplasmic fragment may be anchored to the plasma membrane by incorporating a transmembrane domain (e.g., CD8α transmembrane domain) to the construct. An additional extracellular domain may also be added to the second part of the CAR system, for instance an extracellular domain that mediates homo-dimerization. These modifications may increase receptor output activity, i.e., T cell activation.

[0190] In some aspects, the two parts of the split CAR system contain heterodimerization domains that conditionally interact upon binding of a heterodimerizing small molecule. As such, the receptor components are assembled in the presence of the small molecule, to form an intact system which can then be activated by antigen engagement. Any known heterodimerizing components can be incorporated into a split CAR system. Other small molecule dependent heterodimerization domains may also be used, including, but not limited to, gibberellin-induced dimerization system (GID1-GAI), trimethoprim-SLF induced ecDHFR and FKBP dimerization (Czlapinski et al., J Am Chem Soc., 2008, 130(40): 13186-13187) and ABA (abscisic acid) induced dimerization of PP2C and PYL domains (Cutler et al., Annu Rev Plant Biol. 2010, 61: 651-679). The dual regulation using inducible assembly (e.g., ligand dependent dimerization) and degradation (e.g., destabilizing domain induced CAR degradation) of the split CAR system may provide more flexibility to control the activity of the CAR modified T cells.

### Switchable CAR

[0191] In some embodiments, the CAR of the disclosure may be a switchable CAR. Juillerat et al (Juilerat et al., Sci. Rep., 2016, 6: 18950; the contents of which are incorporated herein by reference in their entirety) recently reported controllable CARs that can be transiently switched on in response to a stimulus (e.g. a small molecule). In this CAR design, a system is directly integrated in the hinge domain that separate the scFv domain from the cell membrane domain in the CAR. Such system is possible to split or combine different key functions of a CAR such as activation and costimulation within different chains of a receptor complex, mimicking the complexity of the TCR native architecture. This integrated system can switch the scFv and antigen interaction between on/off states controlled by the absence/presence of the stimulus.

### Reversible CAR

[0192] In other embodiments, the CAR of the disclosure may be a reversible CAR system. In this CAR architecture, a LID domain (ligand-induced degradation) is incorporated into the CAR system. The CAR can be temporarily down-regulated by adding a ligand of the LID domain. The combination of LID and DD mediated regulation provides tunable control of continuingly activated CAR T cells, thereby reducing CAR mediated tissue toxicity.

### Activation-Conditional CAR

[0193] In some embodiments, the biocircuits described herein may include an activation-conditional chimeric antigen receptor, which is only expressed in an activated immune cell. The expression of the CAR may be coupled to activation conditional control region which refers to one or more nucleic acid sequences that induce the transcription and/or expression of a sequence e.g. a CAR under its control. Such activation conditional control regions may be promoters of genes that are upregulated during the activation of the effector immune cell e.g. IL2 promoter or NFAT binding sites. In some embodiments, activation of the immune cell may be achieved by a constitutively expressed CAR (International Publication NO. WO2016126608; the contents of which are incorporated herein by reference in their entirety).

### Polynucleotides

[0194] Biocircuit components including effector modules, their SREs and payloads, may be nucleic acid-based. The term “nucleic acid,” in its broadest sense, includes any compound and/or substance that comprise a polymer of nucleotides, e.g., linked nucleosides. These polymers are often referred to as polynucleotides. Exemplary nucleic acids or polynucleotides of the disclosure include, but are not limited to, ribonucleic acids (RNAs), deoxyribonucleic acids (DNAs), threose nucleic acids (TNAs), glycol nucleic acids (GNAs), peptide nucleic acids (PNAs), locked nucleic acids (LNAs, including LNA having a Q-D-ribo configuration, α-LNA having an α-L-ribo configuration (a diastereomer of LNA), 2′-amino-LNA having a 2′-amino functionalization, and 2′-amino-α-LNA having a 2′-amino functionalization) or hybrids thereof.

[0195] In some embodiments, the nucleic acid molecule is a messenger RNA (mRNA). As used herein, the term “messenger RNA” (mRNA) refers to any polynucleotide which encodes a polypeptide of interest and which is capable of being translated to produce the encoded polypeptide of interest in vitro, in vivo, in situ or ex vivo. Polynucleotides described herein may be mRNA or any nucleic acid molecule and may or may not be chemically modified.

[0196] Traditionally, the basic components of an mRNA molecule include at least a coding region, a 5′UTR, a 3′UTR, a 5′ cap and a poly-A tail. Building on this wild type modular structure, the present disclosure expands the scope of functionality of traditional mRNA molecules by providing payload constructs which maintain a modular organization, but which comprise one or more structural and/or chemical modifications or alterations which impart useful properties to the polynucleotide, for example tenability of function. As used herein, a “structural” feature or modification is one in which two or more linked nucleosides are inserted, deleted, duplicated, inverted or randomized in a polynucleotide without significant chemical modification to the nucleosides themselves. Because chemical bonds will necessarily be broken and reformed to effect a structural modification, structural modifications are of a chemical nature and hence are chemical modifications. However, structural modifications will result in a different sequence of nucleotides. For example, the polynucleotide “ATCG” may be chemically modified to “AT-5meC-G”. The same polynucleotide may be structurally modified from “ATCG” to “ATCCCG”. Here, the dinucleotide “CC” has been inserted, resulting in a structural modification to the polynucleotide.

[0197] In some embodiments, polynucleotides of the present disclosure may harbor 5′UTR sequences which play a role in translation initiation. 5′UTR sequences may include features such as Kozak sequences which are commonly known to be involved in the process by which the ribosome initiates translation of genes, Kozak sequences have the consensus XCCR(A/G) CCAUG, where R is a purine (adenine or guanine) three bases upstream of the start codon (AUG) and X is any nucleotide. In one embodiment, the Kozak sequence is ACCGCC. By engineering the features that are typically found in abundantly expressed genes of target cells or tissues, the stability and protein production of the polynucleotides of the disclosure can be enhanced.

[0198] Further provided are polynucleotides, which may contain an internal ribosome entry site (IRES) which play an important role in initiating protein synthesis in the absence of 5′ cap structure in the polynucleotide. An IRES may act as the sole ribosome binding site or may serve as one of the multiple binding sites. Polynucleotides of the disclosure containing more than one functional ribosome binding site may encode several peptides or polypeptides that are translated independently by the ribosomes giving rise to bicistronic and/or multicistronic nucleic acid molecules.

[0199] In one embodiment, polynucleotides of the present disclosure may encode variant polypeptides which have a certain identity with a reference polypeptide sequence. As used herein, a “reference polypeptide sequence” refers to a starting polypeptide sequence. Reference sequences may be wild type sequences or any sequence to which reference is made in the design of another sequence.

[0200] The term “identity” as known in the art, refers to a relationship between two or more sequences, as determined by comparing the sequences. In the art, identity also means the degree of sequence relatedness between sequences, as determined by the number of matches between strings of two or more residues (amino acid or nucleic acid). Identity measures the percent of identical matches between two or more sequences with gap alignments (if any) addressed by a particular mathematical model or computer program (i.e., “algorithms”). Identity of related sequences can be readily calculated by known methods. Such methods include, but are not limited to, those described in Computational Molecular Biology, Lesk, A. M., ed., Oxford University Press, New York, 1988; Biocomputing: Informatics and Genome Projects, Smith, D. W., ed., Academic Press, New York, 1993; Computer Analysis of Sequence Data, Part 1, Griffin, A. M., and Griffin, H. G., eds., Humana Press, New Jersey, 1994; Sequence Analysis in Molecular Biology, von Heinje, G., Academic Press, 1987; Sequence Analysis Primer, Gribskov, M. and Devereux, J., eds., M. Stockton Press, New York, 1991; and Carillo et al., SIAM J. Applied Math. 48, 1073 (1988).

[0201] In some embodiments, the variant sequence may have the same or a similar activity as the reference sequence. Alternatively, the variant may have an altered activity (e.g., increased or decreased) relative to a reference sequence. Generally, variants of a particular polynucleotide or polypeptide of the disclosure will have at least about 40%, 45%, 50%, 55%, 60%, 65%, 70%, 75%, 80%, 85%, 90%, 91%, 92%, 93%, 94%, 95%, 96%, 97%, 98%, 99% but less than 100% sequence identity to that particular reference polynucleotide or polypeptide as determined by sequence alignment programs and parameters described herein and known to those skilled in the art. Such tools for alignment include those of the BLAST suite (Stephen F. Altschul, Thomas L. Madden, Alejandro A. Schiffer, Jinghui Zhang, Zheng Zhang, Webb Miller, and David J. Lipman (1997), “Gapped BLAST and PSI-BLAST: a new generation of protein database search programs”, Nucleic Acids Res. 25:3389-3402.)

### Chemical Modifications to Polynucleotides

[0202] According to the present disclosure, the terms “modification” or, as appropriate, “modified” polynucleotides refer to modification with respect to A, G, U (T in DNA) or C nucleotides.

[0203] Modifications of the polynucleotides of the disclosure may be on the nucleoside base and/or sugar portion of the nucleosides which comprise the polynucleotide. In some embodiments, multiple modifications are included in the modified nucleic acid or in one or more individual nucleoside or nucleotide. For example, modifications to a nucleoside may include one or more modifications to the nucleobase and the sugar. Modifications to the polynucleotides of the present disclosure may include any of those taught in, for example, International Publication WO2013052523, the contents of which are incorporated herein by reference in its entirety.

[0204] As described herein “nucleoside” is defined as a compound containing a sugar molecule (e.g., a pentose or ribose) or a derivative thereof in combination with an organic base (e.g., a purine or pyrimidine) or a derivative thereof (also referred to herein as “nucleobase”). As described herein, “nucleotide” is defined as a nucleoside including a phosphate group.

[0205] The modified nucleotides, which may be incorporated into a polynucleotide can be modified on the internucleoside linkage (e.g., phosphate backbone). Herein, in the context of the polynucleotide backbone, the phrases “phosphate” and “phosphodiester” are used interchangeably. Backbone phosphate groups can be modified by replacing one or more of the oxygen atoms with a different substituent. Further, the modified nucleosides and nucleotides can include the wholesale replacement of an unmodified phosphate moiety with another internucleoside linkage. Examples of modified phosphate groups include, but are not limited to, phosphorothioate, phosphoroselenates, boranophosphates, boranophosphate esters, hydrogen phosphonates, phosphoramidates, phosphorodiamidates, alkyl or aryl phosphonates, and phosphotriesters. Phosphorodithioates have both non-linking oxygens replaced by sulfur. The phosphate linker can also be modified by the replacement of a linking oxygen with nitrogen (bridged phosphoramidates), sulfur (bridged phosphorothioates), and carbon (bridged methylene-phosphonates). Other modifications which may be used are taught in, for example, International Application WO2013052523, the contents of which are incorporated herein by reference in their entirety.

[0206] Different sugar modifications, nucleotide modifications, and/or internucleoside linkages (e.g., backbone structures) may exist at various positions in the polynucleotide. One of ordinary skill in the art will appreciate that the nucleotide analogs or other modification(s) may be located at any position(s) of a polynucleotide such that the function of the polynucleotide is not substantially decreased. A modification may also be a 5′ or 3′ terminal modification. The polynucleotide may contain from about 1% to about 100% modified nucleotides (either in relation to overall nucleotide content, or in relation to one or more types of nucleotide, i.e. any one or more of A, G, U or C) or any intervening percentage (e.g., from 1% to 20%, from 1% to 25%, from 1% to 50%, from 1% to 60%, from 1% to 70%, from 1% to 80%, from 1% to 90%, from 1% to 95%, from 10% to 20%, from 10% to 25%, from 10% to 50%, from 10% to 60%, from 10% to 70%, from 10% to 80%, from 10% to 90%, from 10% to 95%, from 10% to 100%, from 20% to 25%, from 20% to 50%, from 20% to 60%, from 20% to 70%, from 20% to 80%, from 20% to 90%, from 20% to 95%, from 20% to 100%, from 50% to 60%, from 50% to 70%, from 50% to 80%, from 50% to 90%, from 50% to 95%, from 50% to 100%, from 70% to 80%, from 70% to 90%, from 70% to 95%, from 70% to 100%, from 80% to 90%, from 80% to 95%, from 80% to 100%, from 90% to 95%, from 90% to 100%, and from 95% to 100%).

[0207] In some embodiments, the polynucleotide includes a modified pyrimidine or purine. In some embodiments, the pyrimidine or purine in the polynucleotide molecule may be replaced with from about 1% to about 100% of a modified uracil or modified uridine (e.g., from 1% to 20%, from 1% to 25%, from 1% to 50%, from 1% to 60%, from 1% to 70%, from 1% to 80%, from 1% to 90%, from 1% to 95%, from 10% to 20%, from 10% to 25%, from 10% to 50%, from 10% to 60%, from 10% to 70%, from 10% to 80%, from 10% to 90%, from 10% to 95%, from 10% to 100%, from 20% to 25%, from 20% to 50%, from 20% to 60%, from 20% to 70%, from 20% to 80%, from 20% to 90%, from 20% to 95%, from 20% to 100%, from 50% to 60%, from 50% to 70%, from 50% to 80%, from 50% to 90%, from 50% to 95%, from 50% to 100%, from 70% to 80%, from 70% to 90%, from 70% to 95%, from 70% to 100%, from 80% to 90%, from 80% to 95%, from 80% to 100%, from 90% to 95%, from 90% to 100%, and from 95% to 100% of a modified pyrimidine or purine.

[0208] In some embodiments, the polynucleotides may comprise two or more effector module component sequences which are in a pattern such as ABABAB or AABBAABBAABB or ABCABCABC or variants thereof repeated once, twice, or more than three times. In these patterns, each letter, A, B, or C represent a different effector module component.

[0209] In yet another embodiment, the polynucleotides may comprise two or more effector module component sequences with each component having one or more sequences. As a non-limiting example, the sequences may be in a pattern such as ABABAB or AABBAABBAABB or ABCABCABC or variants thereof repeated once, twice, or more than three times in each of the regions. As another non-limiting example, the sequences may be in a pattern such as ABABAB or AABBAABBAABB or ABCABCABC or variants thereof repeated once, twice, or more than three times across the entire polynucleotide. In these patterns, each letter, A, B, or C represent a different sequence or component. Codon Selection

[0210] In some embodiments, one or more codons of the polynucleotides of the present disclosure may be replaced with other codons encoding the native amino acid sequence to tune the expression of the SREs, through a process referred to as codon selection. Since mRNA codon, and tRNA anticodon pools tend to vary among organisms, cell types, sub cellular locations and over time, the codon selection described herein is a spatiotemporal (ST) codon selection.

[0211] In some embodiments of the disclosure, certain polynucleotide features may be codon optimized. Codon optimization refers to a process of modifying a nucleic acid sequence for enhanced expression in the host cell by replacing at least 1, 2, 3, 4, 5, 10, 15, 20, 25, 50 or more codons of the native sequence with codons that are most frequently used in the genes of that host cell while maintaining the native amino acid sequence. Codon usage may be measured using the Codon Adaptation Index (CAI) which measures the deviation of a coding polynucleotide sequence from a reference gene set. Codon usage tables are available at the Codon Usage Database (http://www.kazusa.or.jp/codon/) and the CAI can be calculated by EMBOSS CAI program (http://emboss.sourceforge.net/). Codon optimization methods are known in the art and may be useful in efforts to achieve one or more of several goals. These goals include to match codon frequencies in target and host organisms to ensure proper folding, bias nucleotide content to alter stability or reduce secondary structures, minimize tandem repeat codons or base runs that may impair gene construction or expression, customize transcriptional and translational control regions, insert or remove protein signaling sequences, remove/add post translation modification sites in encoded protein (e.g. glycosylation sites), add, remove or shuffle protein domains, insert or delete restriction sites, modify ribosome binding sites and degradation sites, to adjust translational rates to allow the various domains of the protein to fold properly, or to reduce or eliminate problem secondary structures within the polynucleotide. In one embodiment, a polynucleotide sequence or portion thereof is codon optimized using optimization algorithms. Codon options for each amino acid are well-known in the art as are various species table for optimizing for expression in that particular species.

[0212] In some embodiments of the disclosure, certain polynucleotide features may be codon optimized. For example, a preferred region for codon optimization may be upstream (5′) or downstream (3′) to a region which encodes a polypeptide. These regions may be incorporated into the polynucleotide before and/or after codon optimization of the payload encoding region or open reading frame (ORF).

[0213] After optimization (if desired), the polynucleotides components are reconstituted and transformed into a vector such as, but not limited to, plasmids, viruses, cosmids, and artificial chromosomes.

[0214] The stop codon of the polynucleotides of the present disclosure may be modified to include sequences and motifs to alter the expression levels of the SREs, payloads and effector modules of the present disclosure. Such sequences may be incorporated to induce stop codon readthrough, wherein the stop codon may specify amino acids e.g. selenocysteine or pyrrolysine. In other instances, stop codons may be skipped altogether to resume translation through an alternate open reading frame. Stop codon read through may be utilized to tune the expression of components of the effector modules at a specific ratio (e.g. as dictated by the stop codon context). Examples of preferred stop codon motifs include UGAN, UAAN, and UAGN, where N is either C or U.

[0215] Suppression of termination occurs during translation of many viral mRNAs as a means of generating a second protein with extended carboxy terminus. In retroviruses, gag and pol genes are encoded by a single mRNA and separated by an amber termination codon UAG. Translational suppression of the amber codon allows synthesis of the gag pol precursor. Translation suppression is mediated by suppressor tRNAs that can recognize termination codons and insert a specific amino acid. In some embodiments, effector modules described herein may incorporate amber termination codons. Such codons may be used in lieu of or in addition to IRES and p2A sequences in bicistronic constructs. Stop codon read through may be combined with P2A to obtain low level expression of a downstream gene. In some embodiments, the amber stop codons may be combined with tRNA expression or amino-acyl tRNA synthetase for further control.

### Conjugates

[0216] It is contemplated by the present disclosure that the compositions of the present invention may be complexed, conjugated or combined with one or more homologous or heterologous molecules. As used herein, the term “homologous molecule” refers to a molecule which is similar in at least one of structure or function relative to a starting molecule while a “heterologous molecule” is one that differs in at least one of structure or function relative to a starting molecule. Structural homologs are therefore molecules which may be substantially structurally similar. In some embodiments, such homologs may be identical. Functional homologs are molecules which may be substantially functionally similar. In some embodiments, such homologs may be identical.

[0217] Pharmaceutical compositions, biocircuits, biocircuit components, effector modules including their SREs or payloads of the present disclosure may comprise conjugates. Such conjugates of the disclosure may include naturally occurring substances or ligands, such as proteins (e.g., human serum albumin (HSA), low-density lipoprotein (LDL), high-density lipoprotein (HDL), or globulin); carbohydrates (e.g., a dextran, pullulan, chitin, chitosan, inulin, cyclodextrin or hyaluronic acid); or lipids. Conjugates may also be recombinant or synthetic molecules, such as synthetic polymers, e.g., synthetic polyamino acids, an oligonucleotide (e.g. an aptamer). Examples of polyamino acids may include polylysine (PLL), poly L-aspartic acid, poly L-glutamic acid, styrene-maleic acid anhydride copolymer, poly(L-lactide-co-glycolide) copolymer, divinyl ether-maleic anhydride copolymer, N-(2-hydroxypropyl) methacrylamide copolymer (HMPA), polyethylene glycol (PEG), polyvinyl alcohol (PVA), polyurethane, poly (2-ethylacrylic acid), N-isopropylacrylamide polymers, or polyphosphazine. Example of polyamines include: polyethylenimine, polylysine (PLL), spermine, spermidine, polyamine, pseudopeptide-polyamine, peptidomimetic polyamine, dendrimer polyamine, arginine, amidine, protamine, cationic lipid, cationic porphyrin, quaternary salt of a polyamine, or an alpha helical peptide.

[0218] In some embodiments, conjugates may also include targeting groups. As used herein, the term “targeting group” refers to a functional group or moiety attached to an agent that facilitates localization of the agent to a desired region, tissue, cell and/or protein. Such targeting groups may include but are not limited to cell or tissue targeting agents or groups (e.g. lectins, glycoproteins, lipids, proteins, an antibody that binds to a specified cell type such as a kidney cell or other cell type). In some embodiments, targeting groups may comprise thyrotropins, melanotropins, lectins, glycoproteins, surfactant protein A, mucin carbohydrates, multivalent lactose, multivalent galactose, N-acetyl-galactosamine, N-acetyl-gulucosamine, multivalent mannose, multivalent fucose, glycosylated polyaminoacids, multivalent galactose, transferrin, bisphosphonate, polyglutamate, polyaspartate, lipids, cholesterol, steroids, bile acids, folates, vitamin B12, biotin, an RGD peptide, an RGD peptide mimetic or an aptamer.

[0219] In some embodiments, targeting groups may be proteins, e.g., glycoproteins, or peptides, e.g., molecules having a specific affinity for a co-ligand, or antibodies e.g., an antibody, that binds to a specified cell type such as a cancer cell, endothelial cell, or bone cell. Targeting groups may also comprise hormones and/or hormone receptors.

[0220] In some embodiments, targeting groups may be any ligand capable of targeting specific receptors. Examples include, without limitation, folate, GalNAc, galactose, mannose, mannose-6-phosphate, apatamers, integrin receptor ligands, chemokine receptor ligands, transferrin, biotin, serotonin receptor ligands, PSMA, endothelin, GCPII, somatostatin, LDL, and HDL ligands. In some embodiments, targeting groups are aptamers. Such aptamers may be unmodified or comprise any combination of modifications disclosed herein.

[0221] In still other embodiments, pharmaceutical compositions, biocircuits, biocircuit components, effector modules including their SREs or payloads of the present disclosure may be covalently conjugated to cell penetrating polypeptides. In some embodiments, cell-penetrating peptides may also include signal sequences. In some embodiments, conjugates of the disclosure may be designed to have increased stability, increased cell transfection and/or altered biodistribution (e.g., targeted to specific tissues or cell types.)

[0222] In some embodiments, conjugating moieties may be added to pharmaceutical compositions, biocircuits, biocircuit components, effector modules including their SREs or payloads of the present disclosure such that they allow the attachment of detectable labels to targets for clearance. Such detectable labels include, but are not limited to biotin labels, ubiquitins, fluorescent molecules, human influenza hemagglutinin (HA), c-myc, histidine (His), flag, glutathione S-transferase (GST), V5 (a paramyxovirus of simian virus 5 epitope), biotin, avidin, streptavidin, horse radish peroxidase (HRP) and digoxigenin.

[0223] In some embodiments, pharmaceutical compositions, biocircuits, biocircuit components, effector modules including their SREs or payloads of the present disclosure may be combined with one another or other molecules in the treatment of diseases and/or conditions.

### Additional Effector Module Features

[0224] The effector module of the present disclosure may further comprise a signal sequence which regulates the distribution of the payload of interest, a cleavage and/or processing feature which facilitate cleavage of the payload from the effector module construct, a targeting and/or penetrating signal which can regulate the cellular localization of the effector module, a tag, and/or one or more linker sequences which link different components of the effector module.

### Signal Sequences

[0225] In addition to the SRE and payload region, effector modules of the disclosure may further comprise one or more additional features such as one or more signal sequences.

[0226] Signal sequences (sometimes referred to as signal peptides, targeting signals, target peptides, localization sequences, transit peptides, leader sequences or leader peptides) direct proteins (e.g., the effector module of the present disclosure) to their designated cellular and/or extracellular locations. Protein signal sequences play a central role in the targeting and translocation of nearly all secreted proteins and many integral membrane proteins.

[0227] A signal sequence is a short (5-30 amino acids long) peptide present at the N-terminus of the majority of newly synthesized proteins that are destined towards a particular location. Signal sequences can be recognized by signal recognition particles (SRPs) and cleaved using type I and type II signal peptide peptidases. Signal sequences derived from human proteins can be incorporated as a regulatory module of the effector module to direct the effector module to a particular cellular and/or extracellular location. These signal sequences are experimentally verified and can be cleaved (Zhang Z. and Henzel W. J.; “Signal peptide prediction based on analysis of experimentally verified cleavage sites.”; Protein Sci. 2004, 13:2819-2824).

[0228] In some embodiments, a signal sequence may be, although not necessarily, located at the N-terminus or C-terminus of the effector module, and may be, although not necessarily, cleaved off the desired effector module to yield a “mature” payload.

[0229] In some embodiments, the signal sequence used herein may exclude the methionine at the position 1 of amino acid sequence of the signal sequence. This may be referred to as an MIdel mutation.

[0230] In addition to signal sequences naturally occurring such as from a secreted protein, a signal sequence may be avariant modified from a known signal sequence of a protein. For example, U.S. Pat. Nos. 8,258,102 and 9,133,265 to Sleep disclose a modified albumin signal sequence having a secretion signal and an additional X1-X2-X3-X4-X5-motif which can increase protein secretion; U.S. Pat. No. 9,279,007 to Do discloses signal sequences of modified fragments of human immunoglobulin heavy chain binding protein (Bip) that can enhance protein expression and secretion; U.S. Pat. No. 8,148,494 to Leonhartsberger et al., discloses a signal peptide with a cleavage site that can be fused with a recombinant protein; the contents of each of which are incorporated by reference in their entirety.

[0231] In some instances, the secreted signal sequences may be cytokine signal sequences such as, but not limited to, IL2 signal sequence or a p40 signal sequence.

[0232] In some instances, signal sequences directing the payload of interest to the surface membrane of the target cell may be used. Expression of the payload on the surface of the target cell may be useful to limit the diffusion of the payload to non-target in vivo environments, thereby potentially improving the safety profile of the payloads. Additionally, the membrane presentation of the payload may allow for physiologically and qualitative signaling as well as stabilization and recycling of the payload for a longer half-life. Membrane sequences may be the endogenous signal sequence of the N terminal component of the payload of interest. Optionally, it may be desirable to exchange this sequence for a different signal sequence. Signal sequences may be selected based on their compatibility with the secretory pathway of the cell type of interest so that the payload is presented on the surface of the T cell. In some embodiments, the signal sequence may be IgE signal sequence, CD8α signal sequence (also referred to as CD8α leader), or IL15Ra signal sequence (also referred to as IL15Ra leader) or M1del CD8α signal sequence (also referred to as M1del CD8 leader sequence).

[0233] Other signal sequence variants may be used in the present effector module may include those discussed in U.S. patent application publication NOs.: 2007/0141666; PCT patent application publication NOs.: 1993/018181; the contents of each of which are incorporated herein by reference in their entirety.

[0234] Other examples of signal sequences variant may be a modified signal sequence discussed in U.S. Pat. Nos. 8,148,494; 8,258,102; 9,133,265; 9,279,007; and U.S. patent application publication NO. 20070141666; and International patent application publication NO. WO1993018181; the contents of each of which are incorporated herein by reference in their entirety.

[0235] In other examples, a signal sequence may be a heterogeneous signal sequence from other organisms such as virus, yeast and bacteria, which can direct an effector module to a particular cellular site, such as a nucleus (e.g., EP 1209450). Other examples may include Aspartic Protease (NSP24) signal sequences from Trichoderma that can increase secretion of fused protein such as enzymes (e.g., U.S. Pat. No. 8,093,016 to Cervin and Kim), bacterial lipoprotein signal sequences (e.g., PCT application publication NO. WO199109952 to Lau and Rioux), E. coli enterotoxin II signal peptides (e.g., U.S. Pat. No. 6,605,697 to Kwon et al.), E. coli secretion signal sequence (e.g., U.S. patent publication NO. US2016090404 to Malley et al.), a lipase signal sequence from a methylotrophic yeast (e.g., U.S. Pat. No. 8,975,041), and signal peptides for DNases derived from Coryneform bacteria (e.g., U.S. Pat. No. 4,965,197); the contents of each of which are incorporated herein by reference in their entirety.

[0236] Signal sequences may also include nuclear localization signals (NLSs), nuclear export signals (NESs), polarized cell tubulo-vesicular structure localization signals (See, e.g., U.S. Pat. No. 8,993,742; Cour et al., Nucleic Acids Res. 2003, 31(1): 393-396; the contents of each of which are incorporated herein by reference in their entirety), extracellular localization signals, signals to subcellular locations (e.g. lysosome, endoplasmic reticulum, golgi, mitochondria, plasma membrane and peroxisomes, etc.) (See, e.g., U.S. Pat. No. 7,396,811; and Negi et al., Database, 2015, 1-7; the contents of each of which are incorporated herein by reference in their entirety).

### Cleavage Sites

[0237] In some embodiments, the effector module comprises a cleavage and/or processing feature.

[0238] The effector module of the present disclosure may include at least one protein cleavage signal/site. The protein cleavage signal/site may be located at the N-terminus, the C-terminus, at any space between the N- and the C-termini such as, but not limited to, half-way between the N- and C-termini, between the N-terminus and the half-way point, between the half-way point and the C-terminus, and combinations thereof.

[0239] The effector module may include one or more cleavage signal(s)/site(s) of any proteinases. The proteinases may be a serine proteinase, a cysteine proteinase, an endopeptidase, a dipeptidase, a metalloproteinase, a glutamic proteinase, a threonine proteinase and an aspartic proteinase. In some aspects, the cleavage site may be a signal sequence of furin, actinidain, calpain-1, carboxypeptidase A, carboxypeptidase P, carboxypeptidase Y, caspase-1, caspase-2, caspase-3, caspase-4, caspase-5, caspase-6, caspase-7, caspase-8, caspase-9, caspase-10, cathepsin B, cathepsin C, cathepsin G, cathepsin H, cathepsin K, cathepsin L, cathepsin S, cathepsin V, clostripain, chymase, chymotrypsin, elastase, endoproteinase, enterokinase, factor Xa, formic acid, granzyme B, Matrix metallopeptidase-2, Matrix metallopeptidase-3, pepsin, proteinase K, SUMO protease, subtilisin, TEV protease, thermolysin, thrombin, trypsin and TAGZyme.

### Tags

[0240] In some embodiments, the effector module comprises a protein tag.

[0241] The protein tag may be used for detecting and monitoring the process of the effector module. The effector module may include one or more tags such as an epitope tag (e.g., a FLAG or hemagglutinin (HA) tag). A large number of protein tags may be used for the present effector modules. They include, but are not limited to, self-labeling polypeptide tags (e.g., haloalkane dehalogenase (halotag2 or halotag7), ACP tag, clip tag, MCP tag, snap tag), epitope tags (e.g., FLAG, HA, His, and Myc), fluorescent tags (e.g., green fluorescent protein (GFP), red fluorescent protein (RFP), yellow fluorescent protein (YFP), and its variants), bioluminescent tags (e.g. luciferase and its variants), affinity tags (e.g., maltose-binding protein (MBP) tag, glutathione-S-transferase (GST) tag), immunogenic affinity tags (e.g., protein A/G, IRS, AU1, AU5, glu-glu, KT3, S-tag, HSV, VSV-G, Xpress and V5), and other tags (e.g., biotin (small molecule), StrepTag (StrepII), SBP, biotin carboxyl carrier protein (BCCP), eXact, CBP, CYD, HPC, CBD intein-chitin binding domain, Trx, NorpA, and NusA.

[0242] In other embodiments, a tag may also be selected from those disclosed in U.S. Pat. Nos. 8,999,897; 8,357,511; 7,094,568; 5,011,912; 4,851,341; and 4,703,004; U.S patent application publication NOs. US2013115635 and US2013012687; and International application publication NO. WO2013091661; the contents of each of which are incorporated herein by reference in their entirety.

[0243] In some aspects, a multiplicity of protein tags, either the same or different tags, may be used; each of the tags may be located at the same N or C terminus, whereas in other cases these tags may be located at each terminus.

### Linkers

[0244] In some embodiments, the effector module comprises a linker.

[0245] In some embodiments, the effector module of the disclosure may further comprise a linker sequence. The linker region serves primarily as a spacer between two or more polypeptides within the effector module. The “linker” or “spacer”, as used herein, refers to a molecule or group of molecules that connects two molecules, or two parts of a molecule such as two domains of a recombinant protein.

[0246] In some embodiments, “Linker” (L) or “linker domain” or “linker region” or “linker module” or “peptide linker” as used herein refers to an oligo- or polypeptide region of from about 1 to 100 amino acids in length, which links together any of the domains/regions of the effector module (also called peptide linker). The peptide linker may be 1-40 amino acids in length, or 2-30 amino acids in length, or 20-80 amino acids in length, or 50-100 amino acids in length. Linker length may also be optimized depending on the type of payload utilized and based on the crystal structure of the payload. In some instances, a shorter linker length may be preferably selected. In some aspects, the peptide linker is made up of amino acids linked together by peptide bonds, preferably from 1 to 20 amino acids linked by peptide bonds, wherein the amino acids are selected from the 20 naturally occurring amino acids: Glycine (G), Alanine (A), Valine (V), Leucine (L), Isoleucine (I), Serine (S), Cysteine (C), Threonine (T), Methionine (M), Proline (P), Phenylalanine (F), Tyrosine (Y), Tryptophan (W), Histidine (H), Lysine (K), Arginine (R), Aspartate (D), Glutamic acid (E), Asparagine (N), and Glutamine (Q). One or more of these amino acids may be glycosylated, as is understood by those in the art.

[0247] A linker sequence may be a natural linker derived from a multi-domain protein. A natural linker is a short peptide sequence that separates two different domains or motifs within a protein.

[0248] In some aspects, linkers may be flexible or rigid. In other aspects, linkers may be cleavable or non-cleavable. As used herein, the terms “cleavable linker domain or region” or “cleavable peptide linker” are used interchangeably. In some embodiments, the linker sequence may be cleaved enzymatically and/or chemically.

[0249] The linkers of the present disclosure may also be non-peptide linkers. For example, alkyl linkers such as —NH—(CH₂) a-C(O)—, wherein a=2-20 can be used. These alkyl linkers may further be substituted by any non-sterically hindering group such as lower alkyl (e.g., C₁-C₆) lower acyl, halogen (e.g., Cl, Br), CN, NH₂, phenyl, etc.

### Targeting or Penetrating Peptides

[0250] In some embodiments, the effector module comprises a targeting and/or penetrating peptide.

[0251] Small targeting and/or penetrating peptides that selectively recognize cell surface markers (e.g. receptors, trans-membrane proteins, and extra-cellular matrix molecules) can be employed to target the effector module to the desired organs, tissues or cells. Short peptides (5-50 amino acid residues) synthesized in vitro and naturally occurring peptides, or analogs, variants, derivatives thereof, may be incorporated into the effector module for homing the effector module to the desired organs, tissues and cells, and/or subcellular locations inside the cells.

[0252] In some embodiments, a targeting sequence and/or penetrating peptide may be included in the effector module to drive the effector module to a target organ, or a tissue, or a cell (e.g., a cancer cell). In other embodiments, a targeting and/or penetrating peptide may direct the effector module to a specific subcellular location inside a cell. As non-limiting examples, such targeting sequences and/or penetrating peptides may include those for targeting the effector module to desired region of the central nervous system (e.g., U.S. Pat. No. 9,259,432; U.S. application publication NO.: 2015/259392); or adipose tissue (e.g., U.S. Pat. Nos. 8,067,377 and 8,710,017); or prostate (e.g., U.S. patent publication NO.: 2016/0046668); the contents of each of which are incorporated herein by reference in their entirety.

[0253] In other embodiments, a targeting and/or penetrating peptide may direct the effector module to a specific subcellular location inside a cell. As a non-limiting example, a mitochondrion targeting peptide and/or a mitochondria membrane penetrating peptide may be included in the effector module to drive the effector module to the mitochondria of a cell. See e.g., U.S. Pat. Nos. 9,260,495; 9,173,952 and 9,132,198; and U.S. application publication NO.: 2015/361140; the contents of each of which are incorporated herein by reference in their entirety.

[0254] A targeting peptide has any number of amino acids from about 6 to about 30 inclusive. The peptide may have 6, 7, 8, 9, 10, 11, 12, 13, 14, 15, 16, 17, 18, 19, 20, 21, 22, 23, 24, 25, 26, 27, 28, 29 or 30 amino acids. Generally, a targeting peptide may have 25 or fewer amino acids, for example, 20 or fewer, for example 15 or fewer.

[0255] Naturally occurring small targeting and/or penetrating peptides that recognize specific tissues or cells bind cell surface molecules (e.g. receptors, trans-membrane proteins) with high affinity, which make them attractive trafficking moieties. Such peptides may include peptide toxins from microbes, insects (e.g. scorpion, honey bee, spider), animals (e.g. snake) and plants, and analogs, variants and derivatives thereof; and secreted peptide hormones, ligands and signal peptides.

[0256] In some aspects, analogs, variants and derivatives from natural toxins that abolish their cytotoxic activities may be used as targeting peptides. Exotoxin is a toxin secreted by bacteria. Many exotoxins have been shown to bind specific cell molecules. For example, enterotoxins, a group of protein toxins produced and secreted from bacterial organisms bind the mucosal (epithelial) cells of the intestinal wall. Enterotoxins may include, but are not limited to, E. coli heat stable enterotoxin (ST), Cholera toxin (CT), E. coli heat-labile enterotoxin (LT), Bordetella pertussis-derived pertussis toxin (PT), Pseudomonas aeruginosa exotoxin A (ETA), Staphylococcus enterotoxins, Corynebacterium diphtheria-derived diphtheria toxin, enterotoxin NSP4 from rotavirus. Other exotoxins include neurotoxins which affect the nervous system, cardiotoxins which affect the heart, pseudomonas exotoxins, Botulinum neurotoxins, shiga toxin, shiga-like toxin 1 and 2, Clostridium difficile toxins, Clostridium perfringens epsiolon toxin and anthrax toxin.

[0257] In addition to exotoxins, other toxins may include those isolated from plants such as maize RIP, gelonin, pokeweed antiviral protein, saporin, trichsanthin, ricin, abrin; scorpions such as Charybdotoxin; spider such as PcTx1; cone snail such as PcTx1; sea anemone such as gigantoxin 1; honey bees such as mellitins, a group of water-soluble, cationic, amphipathic 26 amino acid alpha-helical peptides isolated from the venoms of honey bee Apis mellifera (western or European or big honey bee), Apis florea (little or dwarf honey bee), Apis dorsata (giant honey bee) and Apis cerana (oriental honey bee); snake venom toxins, bombesin which is originally isolated from the skin of toad, which binds g-protein couple gastrin releasing peptide receptors (e.g. BBR-1/2/3) in the gastric tract and brain. See e.g. Suchanek, G., et al., PNAS (1978) 75:701-704; the contents of which are incorporated by reference in its entirety.

[0258] Peptides hormones and other signal peptides transfer important messages for cell to cell communications, which selectively bind cells that express their receptors with high affinity. In some aspects, peptide hormones may be included in the effector module. Such small peptide hormones and signal peptides may include, but are not limited to, adiponectin, adipose-derived hormone, agouti signaling peptide, allatostatin, amylin, angiotensin, atrial natriuretic peptide, bomben-like peptide, big gastrin, betatrophin, bradykinin, calcitonin, corticotrophin releasing hormone, cosyntrophin, endothelin, enteroglucagon, FGF, FNDC5, follicle-stimulating hormone, gastrin, ghrelin, glucagon and glucagon-like peptide, gonadotrophin, granulocyte colony stimulating factor, growth hormone, growth hormone releasing hormone, hepcidin, human chorionic gonadotrophin, human placental lactogen, incretin, insulin and insulin analogs, insulin-like growth factor, leptin, little gastrin, liraglutide, luteinizing hormone, melanocortin, minigastrin, alpha-melanocyte-stimulating hormone, neuropeptide Y, nerve growth factor (NGF), neurotrophin-3/4, NPH insulin, orexin, obestatin, osteocalcin, pancreatic hormone, parathyroid hormone, peptide hormone, peptide YY, prolactin, preprohormone, relaxi, renin, salcatonin, somatostatin (SST), secretin, substance P, sincalide, teleost leptins, temporin, tesamorelin, thyroid stimulating hormone, urocortin, vasoactive intestinal peptide (VIP), VGF and Vitellogenin.

[0259] Targeting and penetrating peptides may also be engineered biomimetic peptides and/or chemically modified small peptides. Numerous peptides with specific motifs and sequences that target specific cells and tissues with high affinity and selectivity in normal or diseased conditions are identified. A synthetic targeting peptide may be up to 30 amino acids in length or may be longer. A targeting peptide generally has at least about 5 amino acids but may have fewer, for example, 4 amino acids, or 3 amino acids. Generally, a targeting peptide has any number of amino acids from about 6 to about 30 inclusive. Generally, a targeting peptide may have 25 or fewer amino acids, for example, 20 or fewer, for example 15 or fewer.

[0260] A chimeric peptide may also be synthesized with fused amino acids from naturally occurring proteins and artificial amino acid sequences.

### Stimuli

[0261] Biocircuits of the present disclosure are triggered by one or more stimuli. Stimuli include a ligand, an externally added or endogenous metabolite, the presence or absence of a defined ligand, the presence or action of one or more effector modules, or a concentration gradient of ions or biomolecules or the like.

### Ligands

[0262] In some embodiments, the stimulus is a ligand. Ligands may be nucleic acid-based, protein-based, lipid-based, organic, inorganic or any combination of the foregoing.

[0263] In some embodiments, the ligand may be, but is not limited to, a protein, peptide, nucleic acid, lipid, lipid derivative, sterol, steroid, metabolite, metabolite derivative, and small molecule.

[0264] In some embodiments, the stimulus is a small molecule. In some embodiments, the small molecules are cell permeable. In some embodiments, the small molecules are FDA-approved, safe and orally administered.

[0265] In some embodiments, the ligands bind to carbonic anhydrases. In some embodiments, the ligand binds to and inhibits carbonic anhydrase function and is herein referred to as carbonic anhydrase inhibitor.

[0266] In some embodiments, the ligand is a small molecule that binds to carbonic anhydrase 2. In one embodiment, the small molecule is CA2 inhibitor. Examples of CA2 inhibitors include, but are not limited to Celecoxib, Valdecoxib, Rofecoxib, Acetazolamide, Methazolamide, Dorzolamide, Brinzolamide, Diclofenamide, Ethoxzolamide, Zonisamide, Dansylamide, and Dichlorphenamide.

[0267] In some embodiments, the ligands may comprise portions of small molecules known to mediate binding to CA2. Ligands may also be modified to reduce off-target binding to carbonic anhydrases other than CA2 and increase specific binding to CA2.

[0268] Ligands may also be selected from the analysis of the dependence of a known CA2 ligand's activity on its molecular/chemical structure, through Structure Activity Relationships (SAR) study. Any of the methods related to SAR, known in art may be utilized to identify stabilizing ligands of the disclosure. SAR may be utilized to improve properties of the ligand such as specificity, potency, pharmacokinetics, bioavailability, and safety. SAR analysis of known CA2 inhibitors may also be combined with high resolution X ray structures of CA2 complexed with ligands.

[0269] In one embodiment, the stimuli of the present disclosure may be FDA approved ligands capable of binding to the specific DDs or target regions within the DDs.

[0270] In some embodiments, ligands that do not affect the activity of the immune cell, and/or the chimeric antigen receptor, in the absence of the SREs may be preferably selected.

[0271] In some embodiments, two or more ligands may be utilized to stabilize the same stimulus response element.

### Ligand Conjugates

[0272] In some embodiments, the ligand may be complexed or bound to another molecule such as, but not limited to, another ligand, a protein, peptide, nucleic acid, lipid, lipid derivative, sterol, steroid, metabolite, metabolite derivative or small molecule. In some embodiments, the ligand stimulus is complexed to or bound to one or more other molecules. In some embodiments, the ligand stimulus is complexed or bound to one or more different kinds and/or numbers of other molecules. In some embodiments, the ligand stimulus is a multimer of the same kind of ligand. In some embodiments, the ligand stimulus multimer comprises 2, 3, 4, 5, 6, or more monomers.

[0273] Ligands such as small molecules that are well known to bind candidate proteins can be tested for their regulation in protein responses. The small molecules may be clinically approved to be safe and have appropriate pharmaceutical kinetics and distribution. In some embodiments, the stimulus is a ligand of a destabilizing domain (DD), for example, a small molecule that binds a destabilizing domain and stabilizes the POI fused to the destabilizing domain.

### Promoters

[0274] In some embodiments, compositions of the disclosure comprise a promoter.

[0275] As used herein a promoter is defined as a DNA sequence recognized by transcription machinery of the cell, required to initiate specific transcription of the polynucleotide sequence of the present disclosure. Vectors can comprise native or non-native promoters operably linked to the polynucleotides of the disclosure. The promoters selected may be strong, weak, constitutive, inducible, tissue specific, development stage-specific, and/or organism specific. One example of a suitable promoter is the immediate early cytomegalovirus (CMV) promoter such as, but not limited to SEQ ID NO: 5635-5637. This promoter sequence is a strong constitutive promoter sequence capable of driving high levels of expression of polynucleotide sequence that is operatively linked to it. Another example of a promoter is Elongation Growth Factor-1 Alpha (EF-1 alpha) such as, but not limited to, SEQ ID NO: 5638-5642. Other constitutive promoters may also be used, including, but not limited to simian virus 40 (SV40), mouse mammary tumor virus (MMTV), human immunodeficiency virus (HIV), long terminal repeat (LTR), promoter, an avian leukemia virus promoter, an Epstein-Barr virus immediate early promoter, a Rous sarcoma virus promoter as well as human gene promoters including, but not limited to the phosphoglycerate kinase (PGK) promoter (non-limiting examples include SEQ ID NO: 5643-5650), actin promoter, the myosin promoter, the hemoglobin promoter, the Ubiquitin C (Ubc) promoter, the human U6 small nuclear protein promoter and the creatine kinase promoter. In some instances, inducible promoters such as but not limited to metallothionine promoter, glucocorticoid promoter, a progesterone promoter, and a tetracycline promoter may be used.

[0276] In some embodiments, the optimal promoter may be selected based on its ability to achieve minimal expression of the SREs and payloads of the disclosure in the absence of the ligand and detectable expression in the presence of the ligand.

[0277] Additional promoter elements e.g. enhancers may be used to regulate the frequency of transcriptional initiation. Such regions may be located 10-100 base pairs upstream or downstream of the start site. In some instances, two or more promoter elements may be used to cooperatively or independently activate transcription.

[0278] In some embodiments, the promoter of the disclosure may be a Tet-ON promoter. Combination of the transcription regulation Tet system with the DDs permits simultaneous control of gene expression and protein stability. Any of the dual-Tet ON-DD systems described by Pedone et al. (2018) doi: https://doi.org/10.1101/404699 may be useful in the present disclosure (the contents of which are herein incorporated by reference in their entirety.

### Other Regulatory Features

[0279] In some embodiments, compositions of the disclosure may include optional proteasome adaptors. As used herein, the term “proteasome adaptor” refers to any nucleotide/amino acid sequence that targets the appended payload for degradation. In some aspects, the adaptors target the payload for degradation directly thereby circumventing the need for ubiquitination reactions. Proteasome adaptors may be used in conjunction with destabilizing domains to reduce the basal expression of the payload. Exemplary proteasome adaptors include the UbL domain of Rad23 or hHR23b, HPV E7 which binds to both the target protein Rb and the S4 subunit of the proteasome with high affinity, which allows direct proteasome targeting, bypassing the ubiquitination machinery; the protein gankyrin which binds to Rb and the proteasome subunit S6.

### Exemplary Effector Module Constructs

[0280] Biocircuits of the present disclosure may comprise at least one effector module which may comprise at least one SRE derived from CA2 (referred to as “CA2 SREs”) which may be operably linked to at least one payload of interest. These types of biocircuits and effector modules are referred to as “CA2 biocircuits” and “CA2 effector modules”. Additionally, the CA2 effector module may comprise additional features including, but not limited to, signal sequences, linker, spacers, tags, flags, cleavage sites, and IRES. Any of the exemplary SREs (e.g., DDs), payloads of interest, signal sequences, linker, spacers, tags, flags, cleavage sites, and IRES taught herein or known in the art may be combined to create the CA2 effector modules of the present disclosure.

### Payloads of Interest

[0281] In one embodiment, the CA2 effector module comprises a payload of interest. The payload of interest may be a wild-type polypeptide, a fragment of a wild-type polypeptide and/or comprise one or more mutations relative to a wild-type polypeptide. Non-limiting examples of the payload of interest are shown in Table 7.

TABLE 7
Payloads of Interest

| | Amino Acid | Nucleic Acid |
|---|---|---|
| Payload | SEQ ID NO. | SEQ ID NO. |
| CD40L | 6 | 5799 |
| sCD40L (113-261 of WT) | 5800 | 5801 |
| CD40L (aa 14-261 of WT) | 5802 | 5803 |
| CD40L (aa 14-261 of WT, (S110-G116) del) | 5804 | 5805 |
| CD40L (H224G, G226F) | 6011 | 6012 |
| CD40L (H224G, G226H) | 6013 | 6014 |
| CD40L (Y172G, G226F) | 6015 | 6016 |

[0282] In some embodiments, the payloads described herein may be co-expressed with a chimeric antigen receptor.

[0283] In some embodiments, the payloads described herein may be co-expressed with an antigen-specific T cell receptor (TCR).

[0284] The CA2 biocircuits and/or effector modules of the present disclosure may be monocistronic or multicistronic meaning one (monocistronic) or more than one (multicistronic) message (e.g., payload of interest) is produced. If two messages are produced, the CA2 biocircuit or effector module is considered bicistronic.

[0285] In one embodiment, at least one CA2 effector module of the present disclosure is monocistronic.

[0286] In one embodiment, at least one CA2 effector module of the present disclosure is multicistronic.

[0287] In one embodiment, at least one CA2 effector module of the present disclosure is bicistronic.

[0288] In one embodiment, the CA2 biocircuit of the present disclosure is monocistronic.

[0289] In one embodiment, the CA2 biocircuit of the present disclosure is multicistronic.

[0290] In one embodiment, the CA2 biocircuit of the present disclosure is bicistronic.

[0291] In some embodiments, the payload may be a fusion protein comprising any of the immunotherapeutic agents described and ubiquitin. Within the fusion protein, the ubiquitin may be positioned at the N terminus and the immunotherapeutic agent may be positioned at the C terminus. In one aspect, the immunotherapeutic agent may itself be a fusion protein and the ubiquitin may be located in between the proteins that are fused. The payloads may include a single ubiquitin protein or a chain of ubiquitin proteins. The ubiquitin protein may be linked to the immunotherapeutic agent through a single amino acid. The selection of the single amino acid may depend on the desired half-life of the fusion protein. In one embodiment, the immunotherapeutic agent may be IL12.

[0292] In some embodiments, the payload may be the whole or a portion of CD40L. In one embodiment, the payload may be the whole CD40L (SEQ ID NO. 6). In some aspects, the payload may be a portion of CD40L comprising: (i) sCD40L (113-261 of WT) (SEQ ID NO. 5800); (ii) CD40L (aa 14-261 of WT) (SEQ ID NO.5802); or (iii) CD40L (aa 14-261 of WT, (S110-G116) del) (SEQ ID NO. 5804).

[0293] In some embodiments, the payload may be CD40L with one or more mutations as compared to (i) sCD40L (113-261 of WT) (SEQ ID NO. 5800); (ii) CD40L (aa 14-261 of WT) (SEQ ID NO.5802); or (iii) CD40L (aa 14-261 of WT, (5110-G116) del) (SEQ ID NO. 5804).

[0294] In some embodiments, the payload may be CD40L with one or more mutations as compared to wild-type CD40L (amino acid sequence provided as SEQ ID NO. 6). In some aspects the CD40L comprises at least one mutation such as, but not limited to, S110G, F1I1G, E112S, M113G, Q114G, K115S, Y120G, H125G, Y172G, H224G, G226F, G226H, G226W, and G227F. The CD40L payload may comprise two mutations, and the mutations may be, but are not limited to, H224G and G226F, H224G and G226H, Y172G and G226F, or H125 and G227. The CD40L payload may comprise three mutations, and the mutations may be, but are not limited to, Y120G, H224G and G226W. The CD40L payload may comprise four mutations. The CD40L payload may comprise five mutations. The CD40L payload may comprise six mutations and the mutations may be, but are not limited to, S110G, F111G, E112S, M113G, Q114G, and K115S.

### CA2 CD40L Effector Modules

[0295] In some embodiments, CA2 DDs described herein may be appended to a payload using a linker. In some embodiments, an effector module of the present disclosure comprises a linker between the payload and a CA2 DD. The payload may comprise CD40L (SEQ ID NO. 6) or a portion thereof or CD40L (SEQ ID NO. 6) or a portion thereof comprising one or more mutations relative to the amino acid sequence of SEQ ID NO. 6. In some embodiments, an effector module comprises CA2 (aa 2-260 of WT, E106D)-linker-CD40L (SEQ ID NO. 6). In some embodiments, an effector module comprises CA2 (aa 2-260 of WT, G63D)-linker-CD40L (SEQ ID NO. 6). In some embodiments, an effector module comprises CA2 (aa 2-260 of WT, H122Y)-linker-CD40L (SEQ ID NO. 6). In some embodiments, an effector module comprises CA2 (aa 2-260 of WT, 159N)-linker-CD40L (SEQ ID NO. 6). In some embodiments, an effector module comprises CA2 (aa 2-260 of WT, L156H)-linker-CD40L (SEQ ID NO. 6). In some embodiments, an effector module comprises CA2 (aa 2-260 of WT, L183S)-linker-CD40L (SEQ ID NO. 6). In some embodiments, an effector module comprises CA2 (aa 2-260 of WT, L197P)-linker-CD40L (SEQ ID NO. 6). In some embodiments, an effector module comprises CA2 (aa 2-260 of WT, S56F)-linker-CD40L (SEQ ID NO. 6). In some embodiments, an effector module comprises CA2 (aa 2-260 of WT, S56N)-linker-CD40L (SEQ ID NO. 6). In some embodiments, an effector module comprises CA2 (aa 2-260 of WT, W208S)-linker-CD40L (SEQ ID NO. 6). In some embodiments, an effector module comprises CA2 (aa 2-260 of WT, Y193I)-linker-CD40L (SEQ ID NO. 6). In some embodiments, an effector module comprises CA2 (aa 2-260 of WT, Y51T)-linker-CD40L (SEQ ID NO. 6). As used herein, “aa 2-260 of WT” refers to amino acid positions 2-260 of wildtype CA2 (SEQ ID NO. 5810) and the position of the mutated amino acid in the CA2 DD is relative to SEQ ID NO. 5810. In some embodiments, an effector module comprises CA2 (aa 1-260 of WT, E106D)-linker-CD40L (SEQ ID NO. 6). In some embodiments, an effector module comprises CA2 (aa 1-260 of WT, G63D)-linker-CD40L (SEQ ID NO. 6). In some embodiments, an effector module comprises CA2 (aa 1-260 of WT, H122Y)-linker-CD40L (SEQ ID NO. 6). In some embodiments, an effector module comprises CA2 (aa 1-260 of WT, 159N)-linker-CD40L (SEQ ID NO. 6). In some embodiments, an effector module comprises CA2 (aa 1-260 of WT, L156H)-linker-CD40L (SEQ ID NO. 6). In some embodiments, an effector module comprises CA2 (aa 1-260 of WT, L183S)-linker-CD40L (SEQ ID NO. 6). In some embodiments, an effector module comprises CA2 (aa 1-260 of WT, L197P)-linker-CD40L (SEQ ID NO. 6). In some embodiments, an effector module comprises CA2 (aa 1-260 of WT, S56F)-linker-CD40L (SEQ ID NO. 6). In some embodiments, an effector module comprises CA2 (aa 1-260 of WT, S56N)-linker-CD40L (SEQ ID NO. 6). In some embodiments, an effector module comprises CA2 (aa 1-260 of WT, W208S)-linker-CD40L (SEQ ID NO. 6). In some embodiments, an effector module comprises CA2 (aa 1-260 of WT, Y193I)-linker-CD40L (SEQ ID NO. 6). In some embodiments, an effector module comprises CA2 (aa 1-260 of WT, Y51T)-linker-CD40L (SEQ ID NO. 6). As used herein, “aa 1-260 of WT” refers to amino acid positions 1-260 of wildtype CA2 (SEQ ID NO. 5810) and the position of the mutated amino acid in the CA2 DD is relative to SEQ ID NO. 5810.

[0296] In some embodiments, CA2 DDs described herein may be appended to CD40L using any of the components described in Table 8. Table 9 provides CA2 DDs appended to CD40L payloads. CA2 CD40L effector modules may further be operably linked to any of the CARs described herein. CA2 CD40L constructs in tandem with CD19 CAR are provided in Table 9. Any of the DD described herein may be combined with the construct components in Table 8 to prepare regulated CD40L constructs listed in Table 9. In Table 9, “*” represents the translation of the stop codon.

TABLE 8
CA2 CD40L and CA2 CD40L with CAR construct components

| | AA SEQ | NA SEQ |
|---|---|---|
| Component | ID NO. | ID NO. |
| CD8a leader (No Met) | 6004 | 6005 |
| Linker (GS) | GS | GGATCA; GGATCC |
| Linker (G4S)3 | 3528 | 3532 |
| Linker (GS)15 | 5968 | 5969 |
| Linker (GSG) (BamH1-Gly) | GSG | GGATCAGGA |
| Linker (MH) | MH | ATGCAT |
| Linker (GGSGGGSGGGSG) | 5806 | 5807; 6009 |
| | | 6009 |
| Linker (GGS) | GGS | GGAGGATCC |
| eGFP (A206K) | 6021 | 6022 |
| CD40L | 6 | 5799 |
| CD40L (H224G, G226F) | 6011 | 6012 |
| CD40L (H224G, G226H) | 6013 | 6014 |
| CD40L (Y172G, G226F) | 6015 | 6016 |
| CD40L (Y170G, H224G, G226W) | 6017 | 6018 |
| CD40L (H125G, G227F) | 6019 | 6020 |
| CD40L (S110G, F111G, | 6069 | 6070 |
| E112S, M113G, Q114G, K115S) | | |
| CA2 (L156H) | 5761 | 5762 |
| CA2 (aa 2-260 of WT, I59N, G102R) | 5757 | 5758 |
| CA2 (aa 2-260 of WT, L156H) | 5759 | 5760 |
| CA2 (aa 2-260 of WT, G63D, | 5867 | 5868 |
| E69V, N231I) | | |
| CA2 (aa 2-260 of WT, S56N) | 5657 | 5658 |
| CA2 (aa 2-260 of WT, D72F, | 5662 | 5663 |
| V241F, P249L) | | |
| CA2 (aa 2-260 of WT, D71L, | 5669 | 5670 |
| T87N, L250R) | | |
| CA2 (aa 2-260 of WT, L183S) | 5671 | 5672 |
| CA2 (aa 2-260 of WT, | 5875 | 5876 |
| L156H, S172C, F178Y, E186D) | | |
| CA2 (aa 2-260 of WT, R27L, | 5821 | 5822 |
| T87I, H122Y, N252D) | | |
| CA2 (aa 2-260 of WT, L197P) | 5879 | 5880 |
| FLAG-tag | 3481 | 3482 |
| HA Tag | 3493 | 3494 |
| CD19 scFV | 204 | 210 |
| CD8a Hinge and | 1021 | 1022; 1023 |
| Transmembrane Domain | | |
| CD8a Transmembrane domain | 1224 | 1225 |
| CD8 Hinge | 1011 | 1012 |
| 4-1BB intracellular domain | 1259 | 1266 |
| CD3 zeta intracellular domain | 1145 | 1151 |
| P2A Cleavage Site | 3449 | 3450 |

TABLE 9
CA2 CD40L and CA2 CD40L with CAR constructs

| | | AA | NA |
|---|---|---|---|
| | | SEQ | SEQ |
| | | ID | ID |
| ID | AA Sequence | NO. | NO. |
| OT-001990 | MSHHWGYGKHNGPEHWHKDFPIAKGERQSPVDIDTHTAK | 5808 | 5809 |
| (CA2 (Li 56H); | YDPSLKPLSVSYDQATSLRILNNGHAFNVEFDDSQDKAVL | | |
| Linker | KGGPLDGTYRLIQFHFHWGSLDGQGSEHTVDKKKYAAEL | | |
| (GGSGGGSGG | HLVHWNTKYGDFGKAVQQPDGLAVLGIFLKVGSAKPGHQ | | |
| GSG); CD40L; | KVVDVLDSIKTKGKSADFTNFDPRGLLPESLDYWTYPGSL | | |
| stop) | TTPPLLECVTWIVLKEPISVSSEQVLKFRKLNFNGEGEPEEL | | |
| | MVDNWRPAQPLKNRQIKASFKGGSGGGSGGGSGMIETYN | | |
| | QTSPRSAATGLPISMKIFMYLLTVFLITQMIGSALFAVYLHR | | |
| | RLDKIEDERNLHEDFVFMKTIQRCNTGERSLSLLNCEEIKS | | |
| | QFEGFVKDIMLNKEETKKENSFEMQKGDQNPQIAAHVISE | | |
| | ASSKTTSVLQWAEKGYYTMSNNLVTLENGKQLTVKRQGL | | |
| | YYIYAQVTFCSNREASSQAPFIASLCLKSPGRFERILLRAAN | | |
| | THSSAKPCGQQSIHLGGVFELQPGASVFVNVTDPSQVSHGT | | |
| | GFTSFGLLKL* | | |
| OT-002072 | MSHHWGYGKHNGPEHWHKDFPIAKGERQSPVDIDTHTAK | 6023 | 6024 |
| (Met; CA2(aa 2- | YDPSLKPLSVSYDQATSLRNLNNGHAFNVEFDDSQDKAVL | | |
| 260 of WT, | KGGPLDGTYRLIQFHFHWGSLDRQGSEHTVDKKKYAAEL | | |
| I59N, G102R); | HLVHWNTKYGDFGKAVQQPDGLAVLGIFLKVGSAKPGLQ | | |
| Linker (GSG); | KVVDVLDSIKTKGKSADFTNFDPRGLLPESLDYWTYPGSL | | |
| CD4OL; stop) | TTPPLLECVTWIVLKEPISVSSEQVLKFRKLNFNGEGEPEEL | | |
| | MVDNWRPAQPLKNRQIKASFKGSGMIETYNQTSPRSAATG | | |
| | LPISMKIFMYLLTVFLITQMIGSALFAVYLHRRLDKIEDERN | | |
| | LHEDFVFMKTIQRCNTGERSLSLLNCEEIKSQFEGFVKDIM | | |
| | LNKEETKKENSFEMQKGDQNPQIAAHVISEASSKTTSVLQ | | |
| | WAEKGYYTMSNNLVTLENGKQLTVKRQGLYYIYAQVTFC | | |
| | SNREASSQAPFIASLCLKSPGRFERILLRAANTHSSAKPCGQ | | |
| | QSIHLGGVFELQPGASVFVNVTDPSQVSHGTGFTSFGLLKL* | | |
| OT-002073 | MSHHWGYGKHNGPEHWHKDFPIAKGERQSPVDIDTHTAK | 6025 | 6026 |
| (Met; CA2(aa 2- | YDPSLKPLSVSYDQATSLRILNNGHAFNVEFDDSQDKAVL | | |
| 260 of WT, | KGGPLDGTYRLIQFHFHWGSLDGQGSEHTVDKKKYAAEL | | |
| L156H); Linker | HLVHWNTKYGDFGKAVQQPDGLAVLGIFLKVGSAKPGHQ | | |
| (GSG); CD40L ; | KVVDVLDSIKTKGKSADFTNFDPRGLLPESLDYWTYPGSL | | |
| stop) | TTPPLLECVTWIVLKEPISVSSEQVLKFRKLNFNGEGEPEEL | | |
| | MVDNWRPAQPLKNRQIKASFKGSGMIETYNQTSPRSAATG | | |
| | LPISMKIFMYLLTVFLITQMIGSALFAVYLHRRLDKIEDERN | | |
| | LHEDFVFMKTIQRCNTGERSLSLLNCEEIKSQFEGFVKDIM | | |
| | LNKEETKKENSFEMQKGDQNPQIAAHVISEASSKTTSVLQ | | |
| | WAEKGYYTMSNNLVTLENGKQLTVKRQGLYYIYAQVTFC | | |
| | SNREASSQAPFIASLCLKSPGRFERILLRAANTHSSAKPCGQ | | |
| | QSIHLGGVFELQPGASVFVNVTDPSQVSHGTGFTSFGLLKL* | | |
| OT-001968 | MSHHWGYGKHNGPEHWHKDFPIAKGERQSPVDIDTHTAK | 6027 | 6028 |
| (CA2(aa 2-260 | YDPSLKPLSVSYDQATSLRILNNDHAFNVVFDDSQDKAVL | | |
| of WT, G63D, | KGGPLDGTYRLIQFHFHWGSLDGQGSEHTVDKKKYAAEL | | |
| E69V, N231I); | HLVHWNTKYGDFGKAVQQPDGLAVLGIFLKVGSAKPGLQ | | |
| linker | KVVDVLDSIKTKGKSADFTNFDPRGLLPESLDYWTYPGSL | | |
| (GGSGGGSGG | TTPPLLECVTWIVLKEPISVSSEQVLKFRKLNFIGEGEPEEL | | |
| GSG); CD40L ; | MVDNWRPAQPLKNRQIKASFKGGSGGGSGGGSGMIETYN | | |
| stop) | QTSPRSAATGLPISMKIFMYLLTVFLITQMIGSALFAVYLHR | | |
| | RLDKIEDERNLHEDFVFMKTIQRCNTGERSLSLLNCEEIKS | | |
| | QFEGFVKDIMLNKEETKKENSFEMQKGDQNPQIAAHVISE | | |
| | ASSKTTSVLQWAEKGYYTMSNNLVTLENGKQLTVKRQGL | | |
| | YYIYAQVTFCSNREASSQAPFIASLCLKSPGRFERILLRAAN | | |
| | THSSAKPCGQQSIHLGGVFELQPGASVFVNVTDPSQVSHGT | | |
| | GFTSFGLLKL* | | |
| OT-002074 | MSHHWGYGKHNGPEHWHKDFPIAKGERQSPVDIDTHTAK | 6029 | 6030 |
| (Met; CA2(aa 2- | YDPSLKPLSVSYDQATNLRILNNGHAFNVEFDDSQDKAVL | | |
| 260 of WT, | KGGPLDGTYRLIQFHFHWGSLDGQGSEHTVDKKKYAAEL | | |
| S56N); Linker | HLVHWNTKYGDFGKAVQQPDGLAVLGIFLKVGSAKPGLQ | | |
| ((GGSG)3); | KVVDVLDSIKTKGKSADFTNFDPRGLLPESLDYWTYPGSL | | |
| CD40L; stop) | TTPPLLECVTWIVLKEPISVSSEQVLKFRKLNFNGEGEPEEL | | |
| | MVDNWRPAQPLKNRQIKASFKGGSGGGSGGGSGMIETYN | | |
| | QTSPRSAATGLPISMKIFMYLLTVFLITQMIGSALFAVYLHR | | |
| | RLDKIEDERNLHEDFVFMKTIQRCNTGERSLSLLNCEEIKS | | |
| | QFEGFVKDIMLNKEETKKENSFEMQKGDQNPQIAAHVISE | | |
| | ASSKTTSVLQWAEKGYYTMSNNLVTLENGKQLTVKRQGL | | |
| | YYIYAQVTFCSNREASSQAPFIASLCLKSPGRFERILLRAAN | | |
| | THSSAKPCGQQSIHLGGVFELQPGASVFVNVTDPSQVSHGT | | |
| | GFTSFGLLKL* | | |
| OT-002075 | MSHHWGYGKHNGPEHWHKDFPIAKGERQSPVDIDTHTAK | 6031 | 6032 |
| (Met; CA2 (aa 2- | YDPSLKPLSVSYDQATSLRILNNGHAFNVEFDFSQDKAVL | | |
| 260 of WT, | KGGPLDGTYRLIQFHFHWGSLDGQGSEHTVDKKKYAAEL | | |
| D72F, V241F, | HLVHWNTKYGDFGKAVQQPDGLAVLGIFLKVGSAKPGLQ | | |
| P249L) Linker | KVVDVLDSIKTKGKSADFTNFDPRGLLPESLDYWTYPGSL | | |
| ((GGSG)3); | TTPPLLECVTWIVLKEPISVSSEQVLKFRKLNFNGEGEPEEL | | |
| CD4OL); stop | MFDNWRPAQLLKNRQIKASFKGGSGGGSGGGSGMIETYN | | |
| | QTSPRSAATGLPISMKIFMYLLTVFLITQMIGSALFAVYLHR | | |
| | RLDKIEDERNLHEDFVFMKTIQRCNTGERSLSLLNCEEIKS | | |
| | QFEGFVKDIMLNKEETKKENSFEMQKGDQNPQIAAHVISE | | |
| | ASSKTTSVLQWAEKGYYTMSNNLVTLENGKQLTVKRQGL | | |
| | YYIYAQVTFCSNREASSQAPFIASLCLKSPGRFERILLRAAN | | |
| | THSSAKPCGQQSIHLGGVFELQPGASVFVNVTDPSQVSHGT | | |
| | GFTSFGLLKL* | | |
| OT-002076 | MSHHWGYGKHNGPEHWHKDFPIAKGERQSPVDIDTHTAK | 6033 | 6034 |
| (Met; CA2 (aa 2- | YDPSLKPLSVSYDQATSLRILNNGHAFNVEFLDSQDKAVL | | |
| 260 of WT, | KGGPLDGNYRLIQFHFHWGSLDGQGSEHTVDKKKYAAEL | | |
| D71L, T87N, | HLVHWNTKYGDFGKAVQQPDGLAVLGIFLKVGSAKPGLQ | | |
| L250R); Linker | KVVDVLDSIKTKGKSADFTNFDPRGLLPESLDYWTYPGSL | | |
| ((GGSG)3); | TTPPLLECVTWIVLKEPISVSSEQVLKFRKLNFNGEGEPEEL | | |
| CD4OL; stop) | MVDNWRPAQPRKNRQIKASFKGGSGGGSGGGSGMIETYN | | |
| | QTSPRSAATGLPISMKIFMYLLTVFLITQMIGSALFAVYLHR | | |
| | RLDKIEDERNLHEDFVFMKTIQRCNTGERSLSLLNCEEIKS | | |
| | QFEGFVKDIMLNKEETKKENSFEMQKGDQNPQIAAHVISE | | |
| | ASSKTTSVLQWAEKGYYTMSNNLVTLENGKQLTVKRQGL | | |
| | YYIYAQVTFCSNREASSQAPFIASLCLKSPGRFERILLRAAN | | |
| | THSSAKPCGQQSIHLGGVFELQPGASVFVNVTDPSQVSHGT | | |
| | GFTSFGLLKL* | | |
| OT-002077 | MSHHWGYGKHNGPEHWHKDFPIAKGERQSPVDIDTHTAK | 6035 | 6036 |
| (Met; CA2(aa 2- | YDPSLKPLSVSYDQATSLRILNNGHAFNVEFDDSQDKAVL | | |
| 260 of WT, | KGGPLDGTYRLIQFHFHWGSLDGQGSEHTVDKKKYAAEL | | |
| L183S); Linker | HLVHWNTKYGDFGKAVQQPDGLAVLGIFLKVGSAKPGLQ | | |
| ((GGSG)3); | KVVDVLDSIKTKGKSADFTNFDPRGSLPESLDYWTYPGSL | | |
| CD40L; stop) | TTPPLLECVTWIVLKEPISVSSEQVLKFRKLNFNGEGEPEEL | | |
| | MVDNWRPAQPLKNRQIKASFKGGSGGGSGGGSGMIETYN | | |
| | QTSPRSAATGLPISMKIFMYLLTVFLITQMIGSALFAVYLHR | | |
| | RLDKIEDERNLHEDFVFMKTIQRCNTGERSLSLLNCEEIKS | | |
| | QFEGFVKDIMLNKEETKKENSFEMQKGDQNPQIAAHVISE | | |
| | ASSKTTSVLQWAEKGYYTMSNNLVTLENGKQLTVKRQGL | | |
| | YYIYAQVTFCSNREASSQAPFIASLCLKSPGRFERILLRAAN | | |
| | THSSAKPCGQQSIHLGGVFELQPGASVFVNVTDPSQVSHGT | | |
| | GFTSFGLLKL* | | |
| OT-001970 | MSHHWGYGKHNGPEHWHKDFPIAKGERQSPVDIDTHTAK | 6037 | 6038 |
| (Met; CA2(aa 2- | YDPSLKPLSVSYDQATSLRILNNGHAFNVEFDDSQDKAVL | | |
| 260 of WT, | KGGPLDGTYRLIQFHFHWGSLDGQGSEHTVDKKKYAAEL | | |
| L156H, S172C, | HLVHWNTKYGDFGKAVQQPDGLAVLGIFLKVGSAKPGHQ | | |
| F178Y, E186D); | KVVDVLDSIKTKGKCADFTNYDPRGLLPDSLDYWTYPGSL | | |
| linker | TTPPLLECVTWIVLKEPISVSSEQVLKFRKLNFNGEGEPEEL | | |
| (GGSGGGSGG | MVDNWRPAQPLKNRQIKASFKGGSGGGSGGGSGMIETYN | | |
| GSG); CD40L; | QTSPRSAATGLPISMKIFMYLLTVFLITQMIGSALFAVYLHR | | |
| stop) | RLDKIEDERNLHEDFVFMKTIQRCNTGERSLSLLNCEEIKS | | |
| | QFEGFVKDIMLNKEETKKENSFEMQKGDQNPQIAAHVISE | | |
| | ASSKTTSVLQWAEKGYYTMSNNLVTLENGKQLTVKRQGL | | |
| | YYIYAQVTFCSNREASSQAPFIASLCLKSPGRFERILLRAAN | | |
| | THSSAKPCGQQSIHLGGVFELQPGASVFVNVTDPSQVSHGT | | |
| | GFTSFGLLKL* | | |
| OT-001971 | MSHHWGYGKHNGPEHWHKDFPIAKGELQSPVDIDTHTAK | 6039 | 6040 |
| (Met; CA2(aa 2- | YDPSLKPLSVSYDQATSLRILNNGHAFNVEFDDSQDKAVL | | |
| 260 of WT, | KGGPLDGIYRLIQFHFHWGSLDGQGSEHTVDKKKYAAELH | | |
| R27L, T87I, | LVYWNTKYGDFGKAVQQPDGLAVLGIFLKVGSAKPGLQK | | |
| H122Y, N252D); | VVDVLDSIKTKGKSADFTNFDPRGLLPESLDYWTYPGSLTT | | |
| linker | PPLLECVTWIVLKEPISVSSEQVLKFRKLNFNGEGEPEELM | | |
| (GGSGGGSGG | VDNWRPAQPLKDRQIKASFKGGSGGGSGGGSGMIETYNQ | | |
| GSG); CD40L; | TSPRSAATGLPISMKIFMYLLTVFLITQMIGSALFAVYLHRR | | |
| stop) | LDKIEDERNLHEDFVFMKTIQRCNTGERSLSLLNCEEIKSQF | | |
| | EGFVKDIMLNKEETKKENSFEMQKGDQNPQIAAHVISEAS | | |
| | SKTTSVLQWAEKGYYTMSNNLVTLENGKQLTVKRQGLYY | | |
| | IYAQVTFCSNREASSQAPFIASLCLKSPGRFERILLRAANTH | | |
| | SSAKPCGQQSIHLGGVFELQPGASVFVNVTDPSQVSHGTGF | | |
| | TSFGLLKL* | | |
| OT-001969 | MSHHWGYGKHNGPEHWHKDFPIAKGERQSPVDIDTHTAK | 6041 | 6042 |
| (Met; CA2(aa 2- | YDPSLKPLSVSYDQATSLRILNNGHAFNVEFDDSQDKAVL | | |
| 260 of WT, | KGGPLDGTYRLIQFHFHWGSLDGQGSEHTVDKKKYAAEL | | |
| L197P); linker | HLVHWNTKYGDFGKAVQQPDGLAVLGIFLKVGSAKPGLQ | | |
| (GGSGGGSGG | KVVDVLDSIKTKGKSADFTNFDPRGLLPESLDYWTYPGSP | | |
| GSG); CD40L; | TTPPLLECVTWIVLKEPISVSSEQVLKFRKLNFNGEGEPEEL | | |
| stop) | MVDNWRPAQPLKNRQIKASFKGGSGGGSGGGSGMIETYN | | |
| | QTSPRSAATGLPISMKIFMYLLTVFLITQMIGSALFAVYLHR | | |
| | RLDKIEDERNLHEDFVFMKTIQRCNTGERSLSLLNCEEIKS | | |
| | QFEGFVKDIMLNKEETKKENSFEMQKGDQNPQIAAHVISE | | |
| | ASSKTTSVLQWAEKGYYTMSNNLVTLENGKQLTVKRQGL | | |
| | YYIYAQVTFCSNREASSQAPFIASLCLKSPGRFERILLRAAN | | |
| | THSSAKPCGQQSIHLGGVFELQPGASVFVNVTDPSQVSHGT | | |
| | GFTSFGLLKL* | | |
| OT-002155 | MSHHWGYGKHNGPEHWHKDFPIAKGERQSPVDIDTHTAK | 6043 | 6044 |
| (Met; CA2 (aa 2- | YDPSLKPLSVSYDQATSLRILNNGHAFNVEFDDSQDKAVL | | |
| 260 of WT); | KGGPLDGTYRLIQFHFHWGSLDGQGSEHTVDKKKYAAEL | | |
| Linker | HLVHWNTKYGDFGKAVQQPDGLAVLGIFLKVGSAKPGLQ | | |
| ((GGSG)3); | KVVDVLDSIKTKGKSADFTNFDPRGLLPESLDYWTYPGSL | | |
| CD40L; stop) | TTPPLLECVTWIVLKEPISVSSEQVLKFRKLNFNGEGEPEEL | | |
| | MVDNWRPAQPLKNRQIKASFKGGSGGGSGGGSGMIETYN | | |
| | QTSPRSAATGLPISMKIFMYLLTVFLITQMIGSALFAVYLHR | | |
| | RLDKIEDERNLHEDFVFMKTIQRCNTGERSLSLLNCEEIKS | | |
| | QFEGFVKDIMLNKEETKKENSFEMQKGDQNPQIAAHVISE | | |
| | ASSKTTSVLQWAEKGYYTMSNNLVTLENGKQLTVKRQGL | | |
| | YYIYAQVTFCSNREASSQAPFIASLCLKSPGRFERILLRAAN | | |
| | THSSAKPCGQQSIHLGGVFELQPGASVFVNVTDPSQVSHGT | | |
| | GFTSFGLLKL* | | |
| OT-002083 | MSHHWGYGKHNGPEHWHKDFPIAKGERQSPVDIDTHTAK | 6045 | 6046 |
| (Met; CA2(aa 2- | YDPSLKPLSVSYDQATSLRILNNGHAFNVEFDDSQDKAVL | | |
| 260 of WT, | KGGPLDGTYRLIQFHFHWGSLDGQGSEHTVDKKKYAAEL | | |
| L156H); Linker | HLVHWNTKYGDFGKAVQQPDGLAVLGIFLKVGSAKPGHQ | | |
| ((GGSG)3); | KVVDVLDSIKTKGKSADFTNFDPRGLLPESLDYWTYPGSL | | |
| CD40L (H224G, | TTPPLLECVTWIVLKEPISVSSEQVLKFRKLNFNGEGEPEEL | | |
| G226F); stop | MVDNWRPAQPLKNRQIKASFKGGSGGGSGGGSGMIETYN | | |
| | QTSPRSAATGLPISMKIFMYLLTVFLITQMIGSALFAVYLHR | | |
| | RLDKIEDERNLHEDFVFMKTIQRCNTGERSLSLLNCEEIKS | | |
| | QFE GFVKDIMLNKEETKKENSFEMQKGDQNPQIAAHVISE | | |
| | ASSKTTSVLQWAEKGYYTMSNNLVTLENGKQLTVKRQGL | | |
| | YYIYAQVTFCSNREASSQAPFIASLCLKSPGRFERILLRAAN | | |
| | THSSAKPCGQQSIGLFGVFELQPGASVFVNVTDPSQVSHGT | | |
| | GFTSFGLLKL* | | |
| OT-002084 | MSHHWGYGKHNGPEHWHKDFPIAKGERQSPVDIDTHTAK | 6047 | 6048 |
| (Met; CA2(aa 2- | YDPSLKPLSVSYDQATSLRILNNGHAFNVEFDDSQDKAVL | | |
| 260 of WT, | KGGPLDGTYRLIQFHFHWGSLDGQGSEHTVDKKKYAAEL | | |
| L156H); Linker | HLVHWNTKYGDFGKAVQQPDGLAVLGIFLKVGSAKPGHQ | | |
| ((GGSG)3); | KVVDVLDSIKTKGKSADFTNFDPRGLLPESLDYWTYPGSL | | |
| CD40L (H224G, | TTPPLLECVTWIVLKEPISVSSEQVLKFRKLNFNGEGEPEEL | | |
| G226H); stop | MVDNWRPAQPLKNRQIKASFKGGSGGGSGGGSGMIETYN | | |
| | QTSPRSAATGLPISMKIFMYLLTVFLITQMIGSALFAVYLHR | | |
| | RLDKIEDERNLHEDFVFMKTIQRCNTGERSLSLLNCEEIKS | | |
| | QFEGFVKDIMLNKEETKKENSFEMQKGDQNPQIAAHVISE | | |
| | ASSKTTSVLQWAEKGYYTMSNNLVTLENGKQLTVKRQGL | | |
| | YYIYAQVTFCSNREASSQAPFIASLCLKSPGRFERILLRAAN | | |
| | THSSAKPCGQQSIGLHGVFELQPGASVFVNVTDPSQVSHGT | | |
| | GFTSFGLLKL* | | |
| OT-002085 | MSHHWGYGKHNGPEHWHKDFPIAKGERQSPVDIDTHTAK | 6049 | 6050 |
| (Met; CA2(aa 2- | YDPSLKPLSVSYDQATSLRILNNGHAFNVEFDDSQDKAVL | | |
| 260 of WT. | KGGPLDGTYRLIQFHFHWGSLDGQGSEHTVDKKKYAAEL | | |
| L156H); Linker | HLVHWNTKYGDFGKAVQQPDGLAVLGIFLKVGSAKPGHQ | | |
| (GGS); EGFP | KVVDVLDSIKTKGKSADFTNFDPRGLLPESLDYWTYPGSL | | |
| (A206K); Linker | TTPPLLECVTWIVLKEPISVSSEQVLKFRKLNFNGEGEPEEL | | |
| ((GGSG)3); | MVDNWRPAQPLKNRQIKASFKGGSMVSKGEELFTGVVPIL | | |
| CD40L; stop) | VELDGDVNGHKFSVSGEGEGDATYGKLTLKFICTTGKLPV | | |
| | PWPTLVTTLTYGVQCFSRYPDHMKQHDFFKSAMPEGYVQ | | |
| | ERTIFFKDDGNYKTRAEVKFEGDTLVNRIELKGIDFKEDGN | | |
| | ILGHKLEYNYNSHNVYIMADKQKNGIKVNFKIRHNIEDGS | | |
| | VQLADHYQQNTPIGDGPVLLPDNHYLSTQSKLSKDPNEKR | | |
| | DHMVLLEFVTAAGITLGMDELYKGGSGGGSGGGSGMIET | | |
| | YNQTSPRSAATGLPISMKIFMYLLTVFLITQMIGSALFAVYL | | |
| | HRRLDKIEDERNLHEDFVFMKTIQRCNTGERSLSLLNCEEI | | |
| | KSQFEGFVKDIMLNKEETKKENSFEMQKGDQNPQIAAHVI | | |
| | SEASSKTTSVLQWAEKGYYTMSNNLVTLENGKQLTVKRQ | | |
| | GLYYIYAQVTFCSNREASSQAPFIASLCLKSPGRFERILLRA | | |
| | ANTHSSAKPCGQQSIHLGGVFELQPGASVFVNVTDPSQVS | | |
| | HGTGFTSFGLLKL* | | |
| OT-002086 | MSHHWGYGKHNGPEHWHKDFPIAKGERQSPVDIDTHTAK | 6051 | 6052 |
| (Met; CA2(aa 2- | YDPSLKPLSVSYDQATSLRILNNGHAFNVEFDDSQDKAVL | | |
| 260 of WT., | KGGPLDGTYRLIQFHFHWGSLDGQGSEHTVDKKKYAAEL | | |
| L156H); Linker | HLVHWNTKYGDFGKAVQQPDGLAVLGIFLKVGSAKPGHQ | | |
| (GGS); Flag-tag; | KVVDVLDSIKTKGKSADFTNFDPRGLLPESLDYWTYPGSL | | |
| Linker | TTPPLLECVTWIVLKEPISVSSEQVLKFRKLNFNGEGEPEEL | | |
| ((GGSG)3); | MVDNWRPAQPLKNRQIKASFKGGSDYKDDDDKGGSGGG | | |
| CD40L; HA-tag; | SGGGSGMIETYNQTSPRSAATGLPISMKIFMYLLTVFLITQ | | |
| stop | MIGSALFAVYLHRRLDKIEDERNLHEDFVFMKTIQRCNTG | | |
| | ERSLSLLNCEEIKSQFEGFVKDIMLNKEETKKENSFEMQKG | | |
| | DQNPQIAAHVISEASSKTTSVLQWAEKGYYTMSNNLVTLE | | |
| | NGKQLTVKRQGLYYIYAQVTFCSNREASSQAPFIASLCLKS | | |
| | PGRFERILLRAANTHSSAKPCGQQSIHLGGVFELQPGASVF | | |
| | VNVTDPSQVSHGTGFTSFGLLKLYPYDVPDYA* | | |
| OT-002156 | MALPVTALLLPLALLLHAARPDIQMTQTTSSLSASLGDRVT | 6053 | 6054 |
| (Met; CD8α | ISCRASQDISKYLNWYQQKPDGTVKLLIYHTSRLHSGVPSR | | |
| leader (no met); | FSGSGSGTDYSLTISNLEQEDIATYFCQQGNTLPYTFGGGT | | |
| CD19 scFv; | KLEITGGGGSGGGGSGGGGSEVKLQESGPGLVAPSQSLSV | | |
| CD8a Hinge and | TCTVSGVSLPDYGVSWIRQPPRKGLEWLGVIWGSETTYYN | | |
| Transmembrane | SALKSRLTIIKDNSKSQVFLKMNSLQTDDTAIYYCAKHYY | | |
| Domain; CD28 | YGGSYAMDYWGQGTSVTVSSTTTPAPRPPTPAPTIASQPLS | | |
| co-stimulatory | LRPEACRPAAGGAVHTRGLDFACDIYIWAPLAGTCGVLLL | | |
| domain/4-1BB | SLVITLYCKRGRKKLLYIFKQPFMRPVQTTQEEDGCSCRFP | | |
| intracellular | EEEEGGCELRVKFSRSADAPAYKQGQNQLYNELNLGRREE | | |
| domain; CD3 | YDVLDKRRGRDPEMGGKPRRKNPQEGLYNELQKDKMAE | | |
| zeta intracellular | AYSEIGMKGERRRGKGHDGLYQGLSTATKDTYDALHMQ | | |
| domain; Linker | ALPPRGSGATNFSLLKQAGDVEENPGPGSMSHHWGYGKH | | |
| (GSG); P2A | NGPEHWHKDFPIAKGERQSPVDIDTHTAKYDPSLKPLSVSY | | |
| cleavage site; | DQATSLRILNNGHAFNVEFDDSQDKAVLKGGPLDGTYRLI | | |
| Linker (GS); | QFHFHWGSLDGQGSEHTVDKKKYAAELHLVHWNTKYGD | | |
| Met; CA2(aa 2- | FGKAVQQPDGLAVLGIFLKVGSAKPGHQKVVDVLDSIKTK | | |
| 260 of WT, | GKSADFTNFDPRGLLPESLDYWTYPGSLTTPPLLECVTWIV | | |
| L156H); CD40L; | LKEPISVSSEQVLKFRKLNFNGEGEPEELMVDNWRPAQPL | | |
| stop) | KNRQIKASFKGGSGGGSGGGSGMIETYNQTSPRSAATGLPI | | |
| | SMKIFMYLLTVFLITQMIGSALFAVYLHRRLDKIEDERNLH | | |
| | EDFVFMKTIQRCNTGERSLSLLNCEEIKSQFEGFVKDIMLN | | |
| | KEETKKENSFEMQKGDQNPQIAAHVISEASSKTTSVLQWA | | |
| | EKGYYTMSNNLVTLENGKQLTVKRQGLYYIYAQVTFCSN | | |
| | REASSQAPFIASLCLKSPGRFERILLRAANTHSSAKPCGQQS | | |
| | IHLGGVFELQPGASVFVNVTDPSQVSHGTGFTSFGLLKL* | | |
| OT-001605 (Met | MALPVTALLLPLALLLHAARPDIQMTQTTSSLSASLGDRVT | 6055 | 6056 |
| CD8α leader(no | ISCRASQDISKYLNWYQQKPDGTVKLLIYHTSRLHSGVPSR | | |
| met); CD19 | FSGSGSGTDYSLTISNLEQEDIATYFCQQGNTLPYTFGGGT | | |
| scFv; CD8a | KLEITGGGGSGGGGSGGGGSEVKLQESGPGLVAPSQSLSV | | |
| Hinge and | TCTVSGVSLPDYGVSWIRQPPRKGLEWLGVIWGSETTYYN | | |
| Transmembrane | SALKSRLTIIKDNSKSQVFLKMNSLQTDDTAIYYCAKHYY | | |
| Domain; CD28 | YGGSYAMDYWGQGTSVTVSSTTTPAPRPPTPAPTIASQPLS | | |
| co-stimulatory | LRPEACRPAAGGAVHTRGLDFACDIYIWAPLAGTCGVLLL | | |
| domain/4-1BB | SLVITLYCKRGRKKLLYIFKQPFMRPVQTTQEEDGCSCRFP | | |
| intracellular | EEEEGGCELRVKFSRSADAPAYKQGQNQLYNELNLGRREE | | |
| domain; CD3 | YDVLDKRRGRDPEMGGKPRRKNPQEGLYNELQKDKMAE | | |
| zeta intracellular | AYSEIGMKGERRRGKGHDGLYQGLSTATKDTYDALHMQ | | |
| domain; Linker | ALPPRGSATNFSLLKQAGDVEENPGPGSMHMIETYNQTSP | | |
| (GS); P2A | RSAATGLPISMKIFMYLLTVFLITQMIGSALFAVYLHRRLD | | |
| cleavage site; | KIEDERNLHEDFVFMKTIQRCNTGERSLSLLNCEEIKSQFEG | | |
| Linker (GS); | FVKDIMLNKEETKKENSFEMQKGDQNPQIAAHVISEASSK | | |
| Linker (MR); | TTSVLQWAEKGYYTMSNNLVTLENGKQLTVKRQGLYYIY | | |
| CD40L; stop) | AQVTFCSNREASSQAPFIASLCLKSPGRFERILLRAANTHSS | | |
| | AKPCGQQSIHLGGVFELQPGASVFVNVTDPSQVSHGTGFTS | | |
| | FGLLKL* | | |
| OT-002172 | MSHHWGYGKHNGPEHWHKDFPIAKGERQSPVDIDTHTAK | 6071 | 6072 |
| (Met; CA2(aa 2- | YDPSLKPLSVSYDQATSLRILNNGHAFNVEFDDSQDKAVL | | |
| 260 of WT, | KGGPLDGTYRLIQFHFHWGSLDGQGSEHTVDKKKYAAEL | | |
| L156H); Linker | HLVHWNTKYGDFGKAVQQPDGLAVLGIFLKVGSAKPGHQ | | |
| (GGSGGGSGG | KVVDVLDSIKTKGKSADFTNFDPRGLLPESLDYWTYPGSL | | |
| GSG); CD40L | TTPPLLECVTWIVLKEPISVSSEQVLKFRKLNFNGEGEPEEL | | |
| (S110G, F11G, | MVDNWRPAQPLKNRQIKASFKGGSGGGSGGGSGMIETYN | | |
| E112S, M113G, | QTSPRSAATGLPISMKIFMYLLTVFLITQMIGSALFAVYLHR | | |
| Q114G, K115S); | RLDKIEDERNLHEDFVFMKTIQRCNTGERSLSLLNCEEIKS | | |
| stop) | QFEGFVKDIMLNKEETKKENGGSGGSGDQNPQIAAHVISE | | |
| | ASSKTTSVLQWAEKGYYTMSNNLVTLENGKQLTVKRQGL | | |
| | YYIYAQVTFCSNREASSQAPFIASLCLKSPGRFERILLRAAN | | |
| | THSSAKPCGQQSIHLGGVFELQPGASVFVNVTDPSQVSHGT | | |
| | GFTSFGLLKL* | | |

[0297] In some embodiments, the effector modules described herein may include one or more cleavage sites between the DD and CD40L. Inclusion of cleavage sites may uncouple the proteolytic turnover of the DD from the payload, thereby altering the levels of expression of the payload independent of the DD. In some embodiments, the addition of the cleavage site my increase expression of the payload. In other aspects, addition of cleavage site may reduce the expression of the payload.

[0298] In some embodiments, the effector modules described herein may include payloads where regions of the payloads have been substituted for a sequence comprising G and S. As a non-limiting example, in regards to the amino acid sequence, the region may be 2, 3, 4, 5, 6, 7, 8, 9, 10, 11, 12, 13, 14, 15 or more than 15 amino acids in length. The amino acids of the payload may be replaced with a repeating pattern of GG, GS, SG, SS, GGG, GGS, GSS, GSG, SGG, SGS, SSG, SSS or a combination thereof.

[0299] In some embodiments, the effector modules described herein may include payloads where regions of the payloads have been substituted for a sequence comprising G and S. As a non-limiting example, in regards to the amino acid sequence, the region may be 6 amino acids in length. The amino acids of the payload may be replaced with GGS repeated once.

### II. Pharmaceutical Compositions and Formulations

[0300] The present teachings further comprise pharmaceutical compositions comprising one or more of the stimuli, CA2 biocircuits, CA2 effector modules or systems of the present disclosure, and optionally at least one pharmaceutically acceptable excipient or inert ingredient.

[0301] As used herein the term “pharmaceutical composition” refers to a preparation of one or more of the CA2 biocircuits or components described herein, or pharmaceutically acceptable salts thereof, optionally with other chemical components such as physiologically suitable carriers and excipients.

[0302] The term “excipient” or “inactive ingredient” refers to an inert or inactive substance added to a pharmaceutical composition to further facilitate administration of a compound. Non-limiting examples of such inert ingredients are disclosed herein under Formulations.

[0303] In some embodiments, compositions are administered to humans, human patients or subjects. For the purposes of the present disclosure, the phrase “active ingredient” generally refers to any one or more CA2 biocircuit system component to be delivered as described herein.

[0304] Although the descriptions of pharmaceutical compositions provided herein are principally directed to pharmaceutical compositions which are suitable for administration to humans, it will be understood by the skilled artisan that such compositions are generally suitable for administration to any other animal, e.g., to non-human animals, e.g. non-human mammals. Subjects to which administration of the pharmaceutical compositions is contemplated include, but are not limited to, non-human mammals, including agricultural animals such as cattle, horses, chickens and pigs, domestic animals such as cats, dogs, or research animals such as mice, rats, rabbits, dogs and non-human primates.

[0305] A pharmaceutical composition in accordance with the present disclosure may be prepared, packaged, and/or sold in bulk, as a single unit dose, and/or as a plurality of single unit doses. As used herein, a “unit dose” is discrete amount of the pharmaceutical composition comprising a predetermined amount of the active ingredient. The amount of the active ingredient is generally equal to the dosage of the active ingredient which would be administered to a subject and/or a convenient fraction of such a dosage such as, for example, one-half or one-third of such a dosage.

[0306] Relative amounts of the active ingredient, the pharmaceutically acceptable excipient or inert ingredient, and/or any additional ingredients in a pharmaceutical composition in accordance with the disclosure will vary, depending upon the identity, size, and/or condition of the subject treated and further depending upon the route by which the composition is to be administered. By way of example, the composition may comprise between 0.1% and 100%, e.g., between 0.5 and 50%, between 1-30%, between 5-80%, at least 80% (w/w) active ingredient.

[0307] Efficacy of treatment or amelioration of disease can be assessed, for example by measuring disease progression, disease remission, symptom severity, reduction in pain, quality of life, dose of a medication required to sustain a treatment effect, level of a disease marker or any other measurable parameter appropriate for a given disease being treated or targeted for prevention. It is well within the ability of one skilled in the art to monitor efficacy of treatment or prevention by measuring any one of such parameters, or any combination of parameters. In connection with the administration of compositions of the present disclosure, “effective against” for example a cancer, indicates that administration in a clinically appropriate manner results in a beneficial effect for at least a statistically significant fraction of patients, such as an improvement of symptoms, a cure, a reduction in disease load, reduction in tumor mass or cell numbers, extension of life, improvement in quality of life, or other effect generally recognized as positive by medical doctors familiar with treating the particular type of cancer.

[0308] A treatment or preventive effect is evident when there is a statistically significant improvement in one or more parameters of disease status, or by a failure to worsen or to develop symptoms where they would otherwise be anticipated. As an example, a favorable change of at least 10% in a measurable parameter of disease, and preferably at least 20%, 30%, 40%, 50% or more can be indicative of effective treatment. Efficacy for a given composition or formulation of the present disclosure can also be judged using an experimental animal model for the given disease as known in the art. When using an experimental animal model, efficacy of treatment is evidenced when a statistically significant change is observed.

### Formulations

[0309] The compositions of the present disclosure may be formulated in any manner suitable for delivery. The formulation may be, but is not limited to, nanoparticles, poly (lactic-co-glycolic acid) (PLGA) microspheres, lipidoids, lipoplex, liposome, polymers, carbohydrates (including simple sugars), cationic lipids and combinations thereof.

[0310] In one embodiment, the formulation is a nanoparticle which may comprise at least one lipid. The lipid may be selected from, but is not limited to, DLin-DMA, DLin-K-DMA, 98N12-5, C12-200, DLin-MC3-DMA, DLin-KC2-DMA, DODMA, PLGA, PEG, PEG-DMG and PEGylated lipids. In another aspect, the lipid may be a cationic lipid such as, but not limited to, DLin-DMA, DLin-D-DMA, DLin-MC3-DMA, DLin-KC2-DMA and DODMA.

[0311] For polynucleotides described herein, the formulation may be selected from any of those taught, for example, in International Application PCT/US2012/069610, the contents of which are incorporated herein by reference in its entirety.

### Inactive Ingredients

[0312] In some embodiments, pharmaceutical or other formulations may comprise at least one excipient which is an inactive ingredient. As used herein, the term “inactive ingredient” refers to one or more inactive agents included in formulations. In some embodiments, all, none or some of the inactive ingredients which may be used in the formulations of the present disclosure may be approved by the US Food and Drug Administration (FDA).

### III. Dosing, Delivery and Administrations

[0313] The compositions described herein may be delivered to a cell or a subject through one or more routes and modalities. The viral vectors containing one or more CA2 effector modules, SREs, payloads and other components described herein may be used to deliver them to a cell and/or a subject. Other modalities may also be used such as mRNAs, plasmids, and as recombinant proteins.

### Delivery

### Naked Delivery

[0314] Pharmaceutical compositions, CA2 biocircuits, CA2 biocircuit components, CA2 effector modules including their SREs or payloads of the present disclosure may be delivered to cells, tissues, organs and/or organisms in naked form. As used herein, the term “naked” refers to pharmaceutical compositions, CA2 biocircuits, CA2 biocircuit components, CA2 effector modules including their SREs or payloads delivered free from agents or modifications which promote transfection or permeability. The naked pharmaceutical compositions, CA2 biocircuits, CA2 biocircuit components, CA2 effector modules including their SREs or payloads may be delivered to the cells, tissues, organs and/or organisms using routes of administration known in the art and described herein. In some embodiments, naked delivery may include formulation in a simple buffer such as saline or PBS.

### Formulated Delivery

[0315] In some embodiments, pharmaceutical compositions, CA2 biocircuits, CA2 biocircuit components, CA2 effector modules including their SREs or payloads of the present disclosure may be formulated, using methods described herein. Formulations may comprise pharmaceutical compositions, CA2 biocircuits, CA2 biocircuit components, CA2 effector modules including their SREs or payloads which may be modified and/or unmodified. Formulations may further include, but are not limited to, cell penetration agents, pharmaceutically acceptable carriers, delivery agents, bioerodible or biocompatible polymers, solvents, and/or sustained-release delivery depots. Formulations of the present disclosure may be delivered to cells using routes of administration known in the art and described herein.

[0316] Pharmaceutical compositions, CA2 biocircuits, CA2 biocircuit components, CA2 effector modules including their SREs or payloads may also be formulated for direct delivery to organs or tissues in any of several ways in the art including, but not limited to, direct soaking or bathing, via a catheter, by gels, powder, ointments, creams, gels, lotions, and/or drops, by using substrates such as fabric or biodegradable materials coated or impregnated with compositions, and the like.

### Delivery to Cells

[0317] In another aspect of the present disclosure, polynucleotides encoding CA2 biocircuits, CA2 effector modules, SREs (e.g., CA2 DDs), payloads of interest (e.g., immunotherapeutic agents) and compositions described herein and vectors comprising said polynucleotides may be introduced into cells. As a non-limiting example, the cells may be effector immune cells.

[0318] In some aspects of the present disclosure, polynucleotides encoding CA2 biocircuits, CA2 effector modules, SREs (e.g., CA2 DDs), payloads of interest (e.g., immunotherapeutic agents) and compositions of the disclosure, may be packaged into viral vectors or integrated into viral genomes allowing transient or stable expression of the polynucleotides. Preferable viral vectors are retroviral vectors including lentiviral vectors. In order to construct a retroviral vector, a polynucleotide molecule encoding a CA2 biocircuit, an CA2 effector module, a CA2 SRE (e.g., CA2 DD) or a payload of interest (e.g., an immunotherapeutic agent) is inserted into the viral genome in the place of certain viral sequences to produce a virus that is replication-defective. The recombinant viral vector is then introduced into a packaging cell line containing the gag, pol, and env genes, but without the LTR and packaging components. The recombinant retroviral particles are secreted into the culture media, then collected, optionally concentrated, and used for gene transfer. Lentiviral vectors are especially preferred as they are capable of infecting both dividing and non-dividing cells.

[0319] Vectors may also be transferred to cells by non-viral methods by physical methods such as needles, electroporation, sonoporation, hydroporation; chemical carriers such as inorganic particles (e.g. calcium phosphate, silica, gold) and/or chemical methods. In some embodiments, synthetic or natural biodegradable agents may be used for delivery such as cationic lipids, lipid nano emulsions, nanoparticles, peptide-based vectors, or polymer-based vectors.

[0320] In some embodiments, the polypeptides described herein may be delivered to the cell directly. In one embodiment, the polypeptides of the disclosure may be delivered using synthetic peptides comprising an endosomal leakage domain (ELD) fused to a cell penetration domain (CLD). The polypeptides of the present disclosure are co introduced into the cell with the ELD-CLD-synthetic peptide. ELDs facilitate the escape of proteins that are trapped in the endosome, into the cytosol. Such domains are derived proteins of microbial and viral origin and have been described in the art. CPDs allow the transport of proteins across the plasma membrane and have also been described in the art. The ELD-CLD fusion proteins synergistically increase the transduction efficiency when compared to the co-transduction with either domain alone. In some embodiments, a histidine rich domain may optionally be added to the shuttle construct as an additional method of allowing the escape of the cargo from the endosome into the cytosol. The shuttle may also include a cysteine residue at the N or C terminus to generate multimers of the fusion peptide. Multimers of the ELD-CLD fusion peptides generated by the addition of cysteine residue to the terminus of the peptide show even greater transduction efficiency when compared to the single fusion peptide constructs. The polypeptides of the invention may also be appended to appropriate localization signals to direct the cargo to the appropriate sub-cellular location e.g. nucleus. In some embodiments any of the ELDs, CLDs or the fusion ELD-CLD synthetic peptides taught in the International Patent Publication, WO2016161516 and WO2017175072 may be useful in the present invention (the contents of each of which are herein incorporated by reference in their entirety).

Delivery Modalities and/or Vectors

[0321] The CA2 biocircuit systems, CA2 effector modules, SREs and/or payloads of the present disclosure may be delivered using one or more modalities. The present disclosure also provides vectors that package polynucleotides described herein encoding CA2 biocircuits, CA2 effector modules, SREs (e.g., CA2 DDs) and payloads, and combinations thereof. Vectors of the present disclosure may also be used to deliver the packaged polynucleotides to a cell, a local tissue site or a subject. These vectors may be of any kind, including DNA vectors, RNA vectors, plasmids, viral vectors and particles. Viral vector technology is well known and described in Sambrook et al. (2001, Molecular Cloning: A Laboratory Manual, Cold Spring Harbor Laboratory, New York). Viruses, which are useful as vectors include, but are not limited to lentiviral vectors, adenoviral vectors, adeno-associated viral (AAV) vectors, herpes simplex viral vectors, retroviral vectors, oncolytic viruses, and the like.

[0322] In general, vectors contain an origin of replication functional in at least one organism, a promoter sequence and convenient restriction endonuclease site, and one or more selectable markers e.g. a drug resistance gene.

[0323] In some embodiments, the recombinant expression vector may comprise regulatory sequences, such as transcription and translation initiation and termination codons, which are specific to the type of host cell into which the vector is to be introduced.

[0324] In some embodiments, the vector described herein may comprise one or more payloads taught herein, wherein the two or more payloads may be included in one CA2 effector module. In this case, the two or more payloads are tuned by the same stimulus simultaneously. In other embodiments, the vector of the invention may comprise two or more CA2 effector modules, wherein each CA2 effector module comprises a different payload. In this case, the two or more CA2 effector modules and payloads are tuned by different stimuli, providing separately independent regulation of the two or more components.

### Lentiviral Vehicles/Particles

[0325] In some embodiments, lentiviral vehicles/particles may be used as delivery modalities. Lentiviruses are a subgroup of the Retroviridae family of viruses, named because reverse transcription of viral RNA genomes to DNA is required before integration into the host genome. As such, the most important features of lentiviral vehicles/particles are the integration of their genetic material into the genome of a target/host cell. Some examples of lentivirus include the Human Immunodeficiency Viruses: HIV-1 and HIV-2, the Simian Immunodeficiency Virus (SIV), feline immunodeficiency virus (FIV), bovine immunodeficiency virus (BIV), Jembrana Disease Virus (JDV), equine infectious anemia virus (EIAV), equine infectious anemia virus, visna-maedi and caprine arthritis encephalitis virus (CAEV).

[0326] Typically, lentiviral particles making up the gene delivery vehicle are replication defective on their own (also referred to as “self-inactivating”). Lentiviruses are able to infect both dividing and non-dividing cells by virtue of the entry mechanism through the intact host nuclear envelope (Naldini L et al., Curr. Opin. Biotechnol, 1998, 9: 457-463). Recombinant lentiviral vehicles/particles have been generated by multiply attenuating the HIV virulence genes, for example, the genes Env, Vif, Vpr, Vpu, Nef and Tat are deleted making the vector biologically safe. Correspondingly, lentiviral vehicles, for example, derived from HIV-1/HIV-2 can mediate the efficient delivery, integration and long-term expression of transgenes into non-dividing cells. As used herein, the term “recombinant” refers to a vector or other nucleic acid containing both lentiviral sequences and non-lentiviral retroviral sequences.

[0327] Lentiviral particles may be generated by co-expressing the virus packaging elements and the vector genome itself in a producer cell such as human HEK293T cells. These elements are usually provided in three or four separate plasmids. The producer cells are co-transfected with plasmids that encode lentiviral components including the core (i.e. structural proteins) and enzymatic components of the virus, and the envelope protein(s) (referred to as the packaging systems), and a plasmid that encodes the genome including a foreign transgene, to be transferred to the target cell, the vehicle itself (also referred to as the transfer vector). In general, the plasmids or vectors are included in a producer cell line. The plasmids/vectors are introduced via transfection, transduction or infection into the producer cell line. Methods for transfection, transduction or infection are well known by those of skill in the art. As non-limiting example, the packaging and transfer constructs can be introduced into producer cell lines by calcium phosphate transfection, lipofection or electroporation, generally together with a dominant selectable marker, such as neo, DHFR, Gln synthetase or ADA, followed by selection in the presence of the appropriate drug and isolation of clones.

[0328] The producer cell produces recombinant viral particles that contain the foreign gene, for example, the CA2 effector module of the present disclosure. The recombinant viral particles are recovered from the culture media and titrated by standard methods used by those of skill in the art. The recombinant lentiviral vehicles can be used to infect target cells.

[0329] Cells that can be used to produce high-titer lentiviral particles may include, but are not limited to, HEK293T cells, 293G cells, STAR cells (Relander et al., Mol. Ther., 2005, 11: 452-459), FreeStyle™ 293 Expression System (ThermoFisher, Waltham, Mass.), and other HEK293T-based producer cell lines (e.g., Stewart et al., Hum Gene Ther. 2011, 22(3):357-369; Lee et al., Biotechnol Bioeng, 2012, 10996): 1551-1560; Throm et al., Blood. 2009, 113(21): 5104-5110; the contents of each of which are incorporated herein by reference in their entirety).

[0330] In some aspects, the envelope proteins may be heterologous envelope proteins from other viruses, such as the G protein of vesicular stomatitis virus (VSV G) or baculoviral gp64 envelop proteins. The VSV-G glycoprotein may especially be chosen among species classified in the vesiculovirus genus: Carajas virus (CJSV), Chandipura virus (CHPV), Cocal virus (COCV), Isfahan virus (ISFV), Maraba virus (MARAV), Piry virus (PIRYV), Vesicular stomatitis Alagoas virus (VSAV), Vesicular stomatitis Indiana virus (VSIV) and Vesicular stomatitis New Jersey virus (VSNJV) and/or stains provisionally classified in the vesiculovirus genus as Grass carp rhabdovirus, BeAn 157575 virus (BeAn 157575), Boteke virus (BTKV), Calchaqui virus (CQIV), Eel virus American (EVA), Gray Lodge virus (GLOV), Jurona virus (JURY), Klamath virus (KLAV), Kwatta virus (KWAV), La Joya virus (LJV), Malpais Spring virus (MSPV), Mount Elgon bat virus (IMEBV), Perinet virus (PERV), Pike fry rhabdovirus (PFRV), Porton virus (PORV), Radi virus (RADIV), Spring viremia of carp virus (SVCV), Tupaia virus (TUPV), Ulcerative disease rhabdovirus (UDRV) and Yug Bogdanovac virus (YBV). The gp64 or other baculoviral env protein can be derived from Autographa californica nucleopolyhedrovirus (AcMNPV), Anagrapha falcifera nuclear polyhedrosis virus, Bombyx mori nuclear polyhedrosis virus, Choristoneura fumiferana nucleopolyhedrovirus, Orgyia pseudotsugata single capsid nuclear polyhedrosis virus, Epiphyas postvittana nucleopolyhedrovirus, Hyphantria cunea nucleopolyhedrovirus, Galleria mellonella nuclear polyhedrosis virus, Dhori virus, Thogoto virus, Antheraea pemyi nucleopolyhedrovirus or Batken virus.

[0331] Other elements provided in lentiviral particles may comprise retroviral LTR (long-terminal repeat) at either 5′ or 3′ terminus, a retroviral export element, optionally a lentiviral reverse response element (RRE), a promoter or active portion thereof, and a locus control region (LCR) or active portion thereof. The CA2 effector module is linked to the vector.

[0332] Methods for generating recombinant lentiviral particles are discussed in the art, for example, U.S. Pat. Nos. 8,846,385; 7,745,179; 7,629,153; 7,575,924; 7,179,903; and 6,808,905; the contents of each of which are incorporated herein by reference in their entirety.

[0333] Lentivirus vectors used may be selected from, but are not limited to pLVX, pLenti, pLenti6, pLJM1, FUGW, pWPXL, pWPI, pLenti CMV puro DEST, pLJM1-EGFP, pULTRA, pInducer20, pHIV-EGFP, pCW57.1, pTRPE, pELPS, pRRL, and pLionII.

### Lentiviral Vectors and Cell Engineering

[0334] Lentiviral vectors are used for introducing transgenes into T cells (e.g., primary human T cells or Jurkat cells) for preclinical research and clinical applications, including recently approved products such as Tisagenlecleucel (KYMRIAH®) for relapsed/refractory B-cell lymphoma. VSV-G pseudotyped 3rd generation lentiviral vectors offer high titers, high transduction efficiency and safety, and have become the vectors of choice for T cell engineering. While not wishing to be bound by theory, T cell engineering usually involves T cell activation by CD3/CD28 antibodies, followed by lentivirus transduction, and then cell expansion which can last from 5 to 30 days (e.g., 9 to 14 days or 9 to 15 days). In general, lentivirus transgene integration may take over 7 days to fully stabilize in T cells (e.g., primary human T cells or Jurkat cells). While longer cultures can increase the cell numbers, the longer cultures can also change the T cell phenotype to a more differentiated state. Therefore, the duration of ex vivo culture can impact the persistence and efficacy of CAR T cells. For example, cells cultured for shorter duration may display a less differentiated phenotype and can be highly efficacious in preclinical models.

[0335] While not wishing to be bound by theory, the state of T cell differentiation may influence the engraftment and persistence of T cells following adoptive transfer. Ghassemi et al (Reducing Ex Vivo Culture Improves the Antileukemic Activity of Chimeric Antigen Receptor (CAR) T Cells. Cancer Immunol Res; 6(9) September 2018; the contents of which are herein incorporated by reference in their entirety) describe primary human T cell differentiation over time and saw that early harvested CAR T cells exhibited enhanced effector function and proliferation, as well as enhanced potency and persistence in vivo.

[0336] Lentivirus dynamics such as transduction, integration and/or expression kinetics of lentivirally introduced transgenes in T cells (e.g., primary human T cells or Jurkat cells) ex vivo may impact the efficacy and durability of in vivo anti-tumor responses. Some types of T cells may produce different results. For example, the Jurkat cell line may not provide the dynamic range of expression as primary human T cells. Methods to evaluate these lentivirus dynamics are known in the art and are described herein.

[0337] In some embodiments, to determine the transgene expression kinetics CD3/CD28 activated primary human T cells can be transduced with lentivirus carrying a transgene (e.g., a regulated transgene or constitutive transgene such as CD19 CAR, IL12, fluorescent protein or any transgene (e.g., payload) described herein). The cells may be analyzed by methods described herein and/or known in the art for viability, viral genomic integration (e.g., by using quantitative PCR), transcript levels (e.g., by using quantitative RT-PCR), and cell surface expression of the transgene if applicable (e.g., if the transgene is or includes CD19 CAR then the surface expression of the CD19 CAR can be evaluated). The cells may be analyzed prior to transduction and/or after transduction such as 1 day, 2 days, 3 days, 4 days, 5 days, 6 days, 7 days, 8 days, 9 days, 10 days, 11 days, 12 days, 13 days, 14 days, 15 days, 16 days, 17 days, 18 days, 19 days, 20 days, 21 days, 22 days, 23 days, 24 days, 25 days, 26 days, 27 days, 28 days, 29 days, 30 or more than 30 days after transduction.

[0338] In some embodiments, the CD3/CD28 activated primary human T cells can be reactivated with CD3/CD28 beads after transduction. The cells may be reactivated 5 days, 6 days, 7 days, 8 days, 9 days, 10 days, 11 days, 12 days, 13 days, 14 days, 15 days, 16 days, 17 days, 18 days, 19 days, 20 days, 21 days, 22 days, 23 days, 24 days, 25 days, 26 days, 27 days, 28 days, 29 days, 30 or more than 30 days after transduction. The cells may be analyzed by methods described herein and/or known in the art for viability, viral genomic integration (e.g., by using quantitative PCR), transcript levels (e.g., by using quantitative RT-PCR), cell surface expression of the transgene if applicable (e.g., if the transgene is or includes CD19 CAR then the surface expression of the CD19 CAR can be evaluated), copy number, and/or mRNA levels.

[0339] In some embodiments, the cell viability of activated primary human T cells transduced with lentivirus carrying a transgene is greater than 65%, 70%, 75%, 80%, 85%, 90%, 95%, 97%, or 99%. As a non-limiting example, the cell viability is greater than 90%. As a non-limiting example, the cell viability is greater than 85%.

[0340] In some embodiments, the cell viability of Jurkat cells transduced with lentivirus carrying a transgene is greater than 65%, 70%, 75%, 80%, 85%, 90%, 95%, 97%, or 99%. As a non-limiting example, the cell viability is greater than 90%. As a non-limiting example, the cell viability is greater than 85%.

[0341] In some embodiments, the integration of the transgene into the genome of the cell may be at or above the saturation point. As a non-limiting example, the saturation point may be 3 copies per cell.

[0342] In some embodiments, the integration of the transgene into the genome may be high in the initial timepoints evaluated and then decline to a lower integration value before becoming stable for the remainder of the culture. As a non-limiting example, the integration may be up to 20 copies per cell of the transgene into the genome during the early timepoints before declining to 2 copies per cell and being stable throughout the remainder of the culture.

[0343] In some embodiments, the transduction ability of T cells may be evaluated. T cells from at least one donor may be transduced with a lentivirus containing a transgene at a dose that is predicted to reach the saturating levels (e.g., enough virus that each cell should contain a copy if a Poisson distribution is expected) and a higher lentivirus dose that exceeds saturation 5 times. Copies per cell, percentage and MFI of cells (or concentration in media of transgene) may be detected in order to determine if all cells are expressing transgene. As a non-limiting example, T cells from two distinct donors may be transduced with lentivirus which includes a transgene. The transduction may be at two doses, saturation and 5× saturation, and show that 5-10 days after transduction that all groups may reach or exceed a predicted saturating level of integrated transgene and similar expression intensity across groups but not all cells are expressing the transgene. Not all T cells may have equal transduction susceptibility, even when sourced from the same donor. The fraction of total cells that express GFP (above the detection threshold) may vary between donors, lots and/or viral dose. The percent of total cells that express GFP from a single donor may be between 70% and 95%.

[0344] In some embodiments, a percentage of the cultured T cells (e.g., primary human T cells and/or Jurkat cells) may express the transgene. The percentage of cultured T cells expressing the transgene may be, but is not limited to, 5%, 10%, 15%, 20%, 25%, 30%, 35%, 40%, 45%, 50%, 55%, 60%, 65%, 70%, 75%, 80%, 85%, 90%, 95%, 97%, 99% or greater than 99%. As a non-limiting example, the percentage may be greater than 70%. As a non-limiting example, the percentage may be greater than 75%. As a non-limiting example, the percentage may be greater than 80%. As a non-limiting example, the percentage may be greater than 85%. As a non-limiting example, the percentage may be greater than 90%. As a non-limiting example, the percentage may be greater than 95%.

[0345] In some embodiments, the mRNA levels from the culture may decline over the duration of the study. The decline may not be limited to a specific transgene and the trend may be seen across multiple classes of expressed proteins. In order to increase the mRNA levels, the cells may be reactivated after the mRNA levels decrease from the initial levels. The cells may be reactivated 5 days, 6 days, 7 days, 8 days, 9 days, 10 days, 11 days, 12 days, 13 days, 14 days, 15 days, 16 days, 17 days, 18 days, 19 days, 20 days, 21 days, 22 days, 23 days, 24 days, 25 days, 26 days, 27 days, 28 days, 29 days, 30 or more than 30 days after transduction. As a non-limiting example, in order to increase mRNA levels in the culture, the cells may be reactivated with CD3/CD28 beads 13 days after transduction.

[0346] In some embodiments, the surface expression from the culture may decline over the duration of the study. For example, the surface expression may decline between days 3 to 13 days, 3 to 14 days, or 3 to 15 days after transduction. In order to increase the surface expression, the cells may be reactivated after the surface expression decrease from the initial levels. The cells may be reactivated 5 days, 6 days, 7 days, 8 days, 9 days, 10 days, 11 days, 12 days, 13 days, 14 days, 15 days, 16 days, 17 days, 18 days, 19 days, 20 days, 21 days, 22 days, 23 days, 24 days, 25 days, 26 days, 27 days, 28 days, 29 days, 30 or more than 30 days after transduction.

[0347] In some embodiments, the transgene is a CAR such as, but not limited to, CD19 CAR. As a non-limiting example, the CAR is CD19 CAR. The cell viability may be greater than 90% in cells transduced with a CD19 CAR. The cell viability may be greater than 85% in cells transduced with a CD19 CAR. If the cells are primary T cells transduced with a CD19 CAR, then number of viable cells may increase over the initial timepoints before decreasing. If the cells are Jurkat cells transduced with a CD19 CAR, then the number of viable cells may increase for at least 10 days. The number of copies per cell for CD19 CAR transduced cells may be higher for the initial timepoints before decreasing by 50% or more for the later timepoints. The cell surface expression of CD19 CAR may decrease during the course of the study from about 20000 CAR MFI to less than 5000 CAR MFI over a period of 10 days (e.g., day 3 to day 13). After restimulation on day 15 the MFI may increase to above 5000 CAR MFI. The percentage of primary human T cells expressing CAR may be between 40% and 60% for 3-13 days after transduction. The percentage of Jurkat cells expressing CAR may be between 30% and 70% for 3-13 days after transduction. An initial decline of about 20% may be seen between days 3 and 6 after transduction. Restimulation of the T cells may increase the percent of CAR positive cells back to initial percentage levels (e.g., around 60%).

[0348] In some embodiments, the transgene encodes a fluorescent protein such as, but not limited to cytosolic green fluorescence protein (GFP), luciferase, and mCherry. As a non-limiting example, the fluorescent protein is GFP. The cell viability may be greater than 90% in cells transduced with GFP. The cell viability may be greater than 85% in cells transduced with GFP. If the cells are primary T cells transduced with GFP, then the number of viable cells may increase over the initial timepoints before decreasing. If the cells are Jurkat cells transduced with GFP, then the number of viable cells may increase for at least 10 days. The number of copies per cell for GFP transduced cells may be higher for the initial timepoints before decreasing by 50% or more for the later timepoints. The surface expression of the cells may have a steady and rapid decline bottoming out at day 10 with a slight increase if restimulated. The highest level of cell surface expression of GFP in Jurkat cells may be at day 10 (about 35000 GFP MFI) before decreasing for the rest of the study. The percentage of primary human T cells expressing GFP may be around 80% for 3-13 days after transduction. The percentage of Jurkat cells expressing GFP may be around 90% for 3-13 days after transduction.

[0349] In some embodiments, lentivirally engineered cells described herein have genomic DNA integration that stabilizes after an initial decline of copy number, decreasing RNA and surface expression levels over time, and an increase in RNA and surface expression after re-stimulation.

[0350] In some embodiments, lentivirally engineering cells may be evaluated using the following 14-day method where samples are collected 5 times throughout the culture. On day −1 the T cells (e.g., primary human T cells or Jurkat cells) may be thawed and the CD3/CD28 beads are added. On day 0, the lentivirus for each of the conditions is added (e.g., 4 mL of cells at 0.5e6/mL) and there is a control of non-transduced cells. Double media to 8 mL on day 1 and then double the media to 16 mL on day 2. On day 3, harvest 4 mL and then double media to 24 mL on day 4. Harvest 4 mL on day 6 before doubling media to 40 mL. The cells can be split (e.g., 14 mL 0.5e6 cells/mL) on day 8 and then on day 6 harvest 4 mL before doubling media to 40 mL. 4 mL may be harvested on day 10 before the media is doubled to 20 mL. On day 13, 4 mL are harvested before doubling the media to 32 mL. The culture is split in half and half of the culture is activated (CD3/CD28 activation beads 1:1) and stimulated overnight. On day 14, 4 mL of each stimulated and non-stimulated cells are harvested and the culture is ended. Transgene copy number per cell are assayed by harvesting cells and extracting genomic DNA then quantifying with standard curve qPCR against the endogenous genome and against the transgene sequence, then converting the detected quantities to a ratio. Mean Fluorescence Intensity (MFI) is assayed by flow cytometry with appropriate staining for each group. Percent expressing may also be assayed by flow cytometry quantifying the percent of cells fluorescing above threshold. Soluble payloads can be quantified by harvesting culture supernatant at each marked timepoint and running MesoScale Discovery plate assay (MSD) then normalizing for cell density.

### Adeno-Associated Viral Particles

[0351] Delivery of any of the CA2 biocircuits, CA2 biocircuit components, CA2 effector modules, SREs or payloads of the present disclosure may be achieved using recombinant adeno-associated viral (rAAV) vectors. Such vectors or viral particles may be designed to utilize any of the known serotype capsids or combinations of serotype capsids.

[0352] AAV vectors include not only single stranded vectors but self-complementary AAV vectors (scAAVs). scAAV vectors contain DNA which anneals together to form double stranded vector genome. By skipping second strand synthesis, scAAVs allow for rapid expression in the cell.

[0353] The rAAV vectors may be manufactured by standard methods in the art such as by triple transfection, in sf9 insect cells or in suspension cell cultures of human cells such as HEK293 cells.

[0354] The CA2 biocircuits, CA2 biocircuit components, CA2 effector modules, SREs or payloads may be encoded in one or more viral genomes to be packaged in the AAV capsids taught herein.

[0355] Such vector or viral genomes may also include, in addition to at least one or two ITRs (inverted terminal repeats), certain regulatory elements necessary for expression from the vector or viral genome. Such regulatory elements are well known in the art and include for example promoters, introns, spacers, stuffer sequences, and the like.

[0356] The CA2 biocircuits, CA2 biocircuit components, CA2 effector modules, SREs or payloads described herein may be administered in one or more AAV particles.

[0357] In some embodiments, the CA2 effector modules may be administered in one or more AAV particles. In some embodiments, more than one CA2 effector module or SRE may be encoded in a viral genome.

### Retroviral Vehicles/Particles (γ-Retroviral Vectors)

[0358] In some embodiments, retroviral vehicles/particles may be used to deliver the CA2 biocircuits, CA2 biocircuit components, CA2 effector modules, SREs or payloads of the present disclosure. Retroviral vectors (RVs) allow the permanent integration of a transgene in target cells. In addition to lentiviral vectors based on complex HIV-1/2, retroviral vectors based on simple gamma-retroviruses have been widely used to deliver therapeutic genes and demonstrated clinically as one of the most efficient and powerful gene delivery systems capable of transducing abroad range of cell types. Example species of Gamma retroviruses include the murine leukemia viruses (MLVs) and the feline leukemia viruses (FeLV).

[0359] In some embodiments, gamma-retroviral vectors derived from a mammalian gamma-retrovirus such as murine leukemia viruses (MLVs), are recombinant. The MLV families of gamma retroviruses include the ecotropic, amphotropic, xenotropic and polytropic subfamilies. Ecotropic viruses are able to infect only murine cells using mCAT-1 receptor. Examples of ecotropic viruses are Moloney MLV and AKV. Amphotropic viruses infect murine, human and other species through the Pit-2 receptor. One example of an amphotropic virus is the 4070A virus. Xenotropic and polytropic viruses utilize the same (Xprl) receptor but differ in their species tropism. Xenotropic viruses such as NZB-9-1 infect human and other species but not murine species, whereas polytropic viruses such as focus-forming viruses (MCF) infect murine, human and other species.

[0360] Gamma-retroviral vectors may be produced in packaging cells by co-transfecting the cells with several plasmids including one encoding the retroviral structural and enzymatic (gag-pol) polyprotein, one encoding the envelope (env) protein, and one encoding the vector mRNA comprising polynucleotide encoding the compositions of the present disclosure that is to be packaged in newly formed viral particles.

[0361] In some aspects, the recombinant gamma-retroviral vectors are pseudotyped with envelope proteins from other viruses. Envelope glycoproteins are incorporated in the outer lipid layer of the viral particles which can increase/alter the cell tropism. Exemplary envelop proteins include the gibbon ape leukemia virus envelope protein (GALV) or vesicular stomatitis virus G protein (VSV-G), or Simian endogenous retrovirus envelop protein, or Measles Virus H and F proteins, or Human immunodeficiency virus gp120 envelop protein, or cocal vesiculovirus envelop protein (See, e.g., U.S. application publication NO.: 2012/164118; the contents of which are incorporated herein by reference in its entirety). In other aspects, envelope glycoproteins may be genetically modified to incorporate targeting/binding ligands into gamma-retroviral vectors, binding ligands including, but not limited to, peptide ligands, single chain antibodies and growth factors (Waehler et al., Nat. Rev. Genet. 2007, 8(8):573-587; the contents of which are incorporated herein by reference in its entirety). These engineered glycoproteins can retarget vectors to cells expressing their corresponding target moieties. In other aspects, a “molecular bridge” may be introduced to direct vectors to specific cells. The molecular bridge has dual specificities: one end can recognize viral glycoproteins, and the other end can bind to the molecular determinant on the target cell. Such molecular bridges, for example ligand-receptor, avidin-biotin, and chemical conjugations, monoclonal antibodies and engineered fusogenic proteins, can direct the attachment of viral vectors to target cells for transduction (Yang et al., Biotechnol. Bioeng., 2008, 101(2): 357-368; and Maetzig et al., Viruses, 2011, 3, 677-713; the contents of each of which are incorporated herein by reference in their entirety).

[0362] In some embodiments, the recombinant gamma-retroviral vectors are self-inactivating (SIN) gammaretroviral vectors. The vectors are replication incompetent. SIN vectors may harbor a deletion within the 3′ U3 region initially comprising enhancer/promoter activity. Furthermore, the 5′ U3 region may be replaced with strong promoters (needed in the packaging cell line) derived from Cytomegalovirus or RSV, or an internal promotor of choice, and/or an enhancer element. The choice of the internal promotors may be made according to specific requirements of gene expression needed for a particular purpose of the present disclosure.

[0363] In some embodiments, polynucleotides encoding the CA2 biocircuit, CA2 biocircuit components, CA2 effector module, SRE are inserted within the recombinant viral genome. The other components of the viral mRNA of a recombinant gamma-retroviral vector may be modified by insertion or removal of naturally occurring sequences (e.g., insertion of an IRES, insertion of a heterologous polynucleotide encoding a polypeptide or inhibitory nucleic acid of interest, shuffling of a more effective promoter from a different retrovirus or virus in place of the wild-type promoter and the like). In some examples, the recombinant gamma-retroviral vectors may comprise modified packaging signal, and/or primer binding site (PBS), and/or 5′-enhancer/promoter elements in the U3-region of the 5′-long terminal repeat (LTR), and/or 3′-SIN elements modified in the U3-region of the 3′-LTR. These modifications may increase the titers and the ability of infection.

[0364] Gammaretroviral vectors suitable for delivering CA2 biocircuit components, CA2 effector modules, SREs or payloads of the present disclosure may be selected from those disclosed in U.S. Pat. Nos. 8,828,718; 7,585,676; 7,351,585; U.S. application publication NO.: 2007/048285; PCT application publication NOs.: WO2010/113037; WO2014/121005; WO2015/056014; and EP Pat. NOs.: EP1757702; EP1757703 (the contents of each of which are incorporated herein by reference in their entirety).

### Oncolytic Viral Vector

[0365] In some embodiments, polynucleotides of present disclosure may be packaged into oncolytic viruses. As used herein, the term “oncolytic virus” refers to a virus that preferentially infects and kills cancer cells such as vaccine viruses. An oncolytic virus can occur naturally or can be a genetically modified virus such as oncolytic adenovirus, and oncolytic herpes virus.

[0366] In some embodiments, oncolytic vaccine viruses may include viral particles of a thymidine kinase (TK)-deficient, granulocyte macrophage (GM)-colony stimulating factor (CSF)-expressing, replication-competent vaccima virus vector sufficient to induce oncolysis of cells in the tumor; See e.g., U.S. Pat. No. 9,226,977; the contents of which are incorporated herein by reference in their entirety.

Messenger RNA (mRNA)

[0367] In some embodiments, the CA2 effector modules described herein may be designed as a messenger RNA (mRNA). As used herein, the term “messenger RNA” (mRNA) refers to any polynucleotide which encodes a polypeptide of interest and which is capable of being translated to produce the encoded polypeptide of interest in vitro, in vivo, in situ or ex vivo. Such mRNA molecules may have the structural components or features of any of those taught in International Application number PCT/US2013/030062, the contents of which are incorporated herein by reference in its entirety.

[0368] In some embodiments, the CA2 effector modules may be designed as self-amplifying RNA. “Self-amplifying RNA” as used herein refers to RNA molecules that can replicate in the host resulting in the increase in the amount of the RNA and the protein encoded by the RNA. Such self-amplifying RNA may have structural features or components of any of those taught in International Patent Application Publication No. WO2011005799 (the contents of which are incorporated herein by reference in their entirety).

### Dosing

[0369] The present disclosure provides methods comprising administering any one or more or component of a CA2 biocircuit system to a subject in need thereof. These may be administered to a subject using any amount and any route of administration effective for preventing or treating or imaging a disease, disorder, and/or condition (e.g., a disease, disorder, and/or condition relating to cancer or an autoimmune disease). The exact amount required will vary from subject to subject, depending on the species, age, and general condition of the subject, the severity of the disease, the particular composition, its mode of administration, its mode of activity, and the like.

[0370] Compositions in accordance with the present disclosure are typically formulated in dosage unit form for ease of administration and uniformity of dosage. It will be understood, however, that the total daily usage of the compositions of the present disclosure may be decided by the attending physician within the scope of sound medical judgment. The specific therapeutically effective, prophylactically effective, or appropriate imaging dose level for any particular patient will depend upon a variety of factors including the disorder being treated and the severity of the disorder; the activity of the specific compound employed; the specific composition employed; the age, body weight, general health, sex and diet of the patient; the time of administration, route of administration, and rate of excretion of the specific compound employed; the duration of the treatment; drugs used in combination or coincidental with the specific compound employed; and like factors well known in the medical arts.

[0371] In some embodiments, compositions described herein may be used in varying doses to avoid T cell exhaustion, prevent cytokine release syndrome and minimize toxicity associated with immunotherapy. For example, low doses of the compositions of the present disclosure may be used to initially treat patients with high tumor burden, while patients with low tumor burden may be treated with high and repeated doses of the compositions described herein to ensure recognition of a minimal tumor antigen load. In another instance, the compositions of the present invention may be delivered in a pulsatile fashion to reduce tonic T cell signaling and enhance persistence in vivo. In some aspects, toxicity may be minimized by initially using low doses of the compositions of the invention, prior to administering high doses. Dosing may be modified if serum markers such as ferritin, serum C-reactive protein, IL6, IFN-γ, and TNF-α are elevated.

[0372] In some embodiments, the neurotoxicity may be associated with CAR or TIL therapy. Such neurotoxicity may be associated CD19-CARs. Toxicity may be due to excessive T cell infiltration into the brain. In some embodiments, neurotoxicity may be alleviated by preventing the passage of T cells through the blood brain barrier. This can be achieved by the targeted gene deletion of the endogenous alpha-4 integrin inhibitors such as tysabri/natalizumab may also be useful in the present invention.

[0373] Also provided herein are methods of administering ligands in accordance with the invention to a subject in need thereof. The ligand may be administered to a subject or to cells, using any amount and any route of administration effective for tuning the CA2 biocircuits of the invention. The exact amount required will vary from subject to subject, depending on the species, age, and general condition of the subject, the severity of the disease, the particular composition, its mode of administration, its mode of activity, and the like. The subject may be a human, a mammal, or an animal. Compositions in accordance with the invention are typically formulated in unit dosage form for ease of administration and uniformity of dosage. It will be understood, however, that the total daily usage of the compositions of the present invention may be decided by the attending physician within the scope of sound medical judgment. In certain embodiments, the ligands in accordance with the present invention may be administered at dosage levels sufficient to deliver from about 0.0001 mg/kg to about 100 mg/kg, from about 0.001 mg/kg to about 0.05 mg/kg, from about 0.005 mg/kg to about 0.05 mg/kg, from about 0.001 mg/kg to about 0.005 mg/kg, from about 0.05 mg/kg to about 0.5 mg/kg, from about 0.01 mg/kg to about 50 mg/kg, from about 0.1 mg/kg to about 40 mg/kg, from about 0.5 mg/kg to about 30 mg/kg, from about 0.01 mg/kg to about 10 mg/kg, from about 0.1 mg/kg to about 10 mg/kg, or from about 1 mg/kg to about 25 mg/kg, from about 10 mg/kg to about 100 mg/kg, from about 50 mg/kg to about 500 mg/kg, from about 100 mg/kg to about 1000 mg/kg, of subject body weight per day, one or more times a day, to obtain the desired effect. In some embodiments, the dosage levels may be 1 mg/kg, 5 mg/kg, 10 mg/kg, 20 mg/kg, 30 mg/kg, 40 mg/kg, 50 mg/kg, 60 mg/kg, 70 mg/kg, 80 mg/kg, 90 mg/kg, 100 mg/kg, 100 mg/kg, 110 mg/kg, 120 mg/kg, 130 mg/kg, 140 mg/kg, 150 mg/kg, 160 mg/kg, 170 mg/kg, 180 mg/kg, 190 mg/kg or mg/kg of subject body weight per day, or more times a day, to obtain the desired effect.

[0374] The present disclosure provides methods for delivering to a cell or tissue any of the ligands described herein, comprising contacting the cell or tissue with said ligand and can be accomplished in vitro, ex vivo, or in vivo. In certain embodiments, the ligands in accordance with the present invention may be administered to cells at dosage levels sufficient to deliver from about 1 nM to about 10 nM, from about 5 nM to about 50 nM, from about 10 nM to about 100 nM, from about 50 nM to about 500 nM, from about 100 nM to about 1000 nM, from about 1 M to about 10 M, from about 5 μM to about 50 μM from about 10M to about 100 μM from about 25 μM to about 250 μM from about 50 μM to about 500 μM. In some embodiments, the ligand may be administered to cells at doses selected from but not limited to 0.00064 μM, 0.0032 μM, 0.016 μM, 0.08 μM, 0.4 M, 1 μM 2 μM, 10 μM, 50 μM, 75, μM, 100 μM, 150 μM, 175 μM, 200 μM, 250 μM.

[0375] The desired dosage of the ligands of the present invention may be delivered only once, three times a day, two times a day, once a day, every other day, every third day, every week, every two weeks, every three weeks, or every four weeks. In certain embodiments, the desired dosage may be delivered using multiple administrations (e.g., two, three, four, five, six, seven, eight, nine, ten, eleven, twelve, thirteen, fourteen, or more administrations). When multiple administrations are employed, split dosing regimens such as those described herein may be used. As used herein, a “split dose” is the division of “single unit dose” or total daily dose into two or more doses, e.g., two or more administrations of the “single unit dose”. As used herein, a “single unit dose” is a dose of any therapeutic administered in one dose/at one time/single route/single point of contact, i.e., single administration event. The desired dosage of the ligand of the present disclosure may be administered as a “pulse dose” or as a “continuous flow”. As used herein, a “pulse dose” is a series of single unit doses of any therapeutic administered with a set frequency over a period of time. As used herein, a “continuous flow” is a dose of therapeutic administered continuously for a period of time in a single route/single point of contact, i.e., continuous administration event. A total daily dose, an amount given or prescribed in 24-hour period, may be administered by any of these methods, or as a combination of these methods, or by any other methods suitable for a pharmaceutical administration.

### Administration

[0376] In some embodiments, the compositions for immunotherapy may be administered to cells ex vivo and subsequently administered to the subject. Immune cells can be isolated and expanded ex vivo using a variety of methods known in the art. For example, methods of isolating cytotoxic T cells are described in U.S. Pat. Nos. 6,805,861 and 6,531,451; the contents of each of which are incorporated herein by reference in their entirety. Isolation of NK cells is described in U.S. Pat. No. 7,435,596; the contents of which are incorporated by reference herein in its entirety.

[0377] In some embodiments, depending upon the nature of the cells, the cells may be introduced into a host organism e.g. a mammal, in a wide variety of ways including by injection, transfusion, infusion, local instillation or implantation. In some aspects, the cells described herein may be introduced at the site of the tumor. The number of cells that are employed will depend upon a number of circumstances, the purpose for the introduction, the lifetime of the cells, the protocol to be used, for example, the number of administrations, the ability of the cells to multiply, or the like. The cells may be in a physiologically-acceptable medium.

[0378] In some embodiments, the cells described herein may be administrated in multiple doses to subjects having a disease or condition. The administrations generally effect an improvement in one or more symptoms of cancer or a clinical condition and/or treat or prevent cancer or clinical condition or symptom thereof.

[0379] In some embodiments, the compositions for immunotherapy may be administered in vivo. In some embodiments, polypeptides of the present disclosure comprising CA2 biocircuits, CA2 effector molecules, SREs, payloads of interest (e.g., immunotherapeutic agents) and compositions described herein may be delivered in vivo to the subject. In vivo delivery of immunotherapeutic agents is well described in the art. For example, methods of delivery of cytokines are described in the E.P. Pat. NO. EP0930892 A1, the contents of which are incorporated herein by reference.

### Routes of Delivery

[0380] The pharmaceutical compositions, CA2 biocircuits, CA2 biocircuit components, CA2 effector modules including their SREs (e.g., CA2 DDs), payloads (e.g., immunotherapeutic agents), vectors and cells of the present disclosure may be administered by any route to achieve a therapeutically effective outcome.

These include, but are not limited to enteral (into the intestine), gastroenteral, epidural (into the dura matter), oral (by way of the mouth), transdermal, peridural, intracerebral (into the cerebrum), intracerebroventricular (into the cerebral ventricles), epicutaneous (application onto the skin), intradermal, (into the skin itself), subcutaneous (under the skin), nasal administration (through the nose), intravenous (into a vein), intravenous bolus, intravenous drip, intraarterial (into an artery), intramuscular (into a muscle), intracardiac (into the heart), intraosseous infusion (into the bone marrow), intrathecal (into the spinal canal), intraperitoneal, (infusion or injection into the peritoneum), intravesical infusion, intravitreal, (through the eye), intracavernous injection (into a pathologic cavity) intracavitary (into the base of the penis), intravaginal administration, intrauterine, extra-amniotic administration, transdermal (diffusion through the intact skin for systemic distribution), transmucosal (diffusion through a mucous membrane), transvaginal, insufflation (snorting), sublingual, sublabial, enema, eye drops (onto the conjunctiva), in ear drops, auricular (in or by way of the ear), buccal (directed toward the cheek), conjunctival, cutaneous, dental (to a tooth or teeth), electro-osmosis, endocervical, endosinusial, endotracheal, extracorporeal, hemodialysis, infiltration, interstitial, intra-abdominal, intra-amniotic, intra-articular, intrabiliary, intrabronchial, intrabursal, intracartilaginous (within a cartilage), intracaudal (within the cauda equine), intracisternal (within the cisterna magna cerebellomedularis), intracorneal (within the cornea), dental intracornal, intracoronary (within the coronary arteries), intracorporus cavernosum (within the dilatable spaces of the corporus cavernosa of the penis), intradiscal (within a disc), intraductal (within a duct of a gland), intraduodenal (within the duodenum), intradural (within or beneath the dura), intraepidermal (to the epidermis), intraesophageal (to the esophagus), intragastric (within the stomach), intragingival (within the gingivae), intraileal (within the distal portion of the small intestine), intralesional (within or introduced directly to a localized lesion), intraluminal (within a lumen of a tube), intralymphatic (within the lymph), intramedullary (within the marrow cavity of a bone), intrameningeal (within the meninges), intramyocardial (within the myocardium), intraocular (within the eye), intraovarian (within the ovary), intrapericardial (within the pericardium), intrapleural (within the pleura), intraprostatic (within the prostate gland), intrapulmonary (within the lungs or its bronchi), intrasinal (within the nasal or periorbital sinuses), intraspinal (within the vertebral column), intrasynovial (within the synovial cavity of a joint), intratendinous (within a tendon), intratesticular (within the testicle), intrathecal (within the cerebrospinal fluid at any level of the cerebrospinal axis), intrathoracic (within the thorax), intratubular (within the tubules of an organ), intratumor (within a tumor), intratympanic (within the aurus media), intravascular (within a vessel or vessels), intraventricular (within a ventricle), iontophoresis (by means of electric current where ions of soluble salts migrate into the tissues of the body), irrigation (to bathe or flush open wounds or body cavities), laryngeal (directly upon the larynx), nasogastric (through the nose and into the stomach), occlusive dressing technique (topical route administration which is then covered by a dressing which occludes the area), ophthalmic (to the external eye), oropharyngeal (directly to the mouth and pharynx), parenteral, percutaneous, periarticular, peridural, perineural, periodontal, rectal, respiratory (within the respiratory tract by inhaling orally or nasally for local or systemic effect), retrobulbar (behind the pons or behind the eyeball), intramyocardial (entering the myocardium), soft tissue, subarachnoid, subconjunctival, submucosal, topical, transplacental (through or across the placenta), transtracheal (through the wall of the trachea), transtympanic (across or through the tympanic cavity), ureteral (to the ureter), urethral (to the urethra), vaginal, caudal block, diagnostic, nerve block, biliary perfusion, cardiac perfusion, photopheresis or spinal.

### Parenteral and Injectable Administration

[0381] In some embodiments, pharmaceutical compositions, CA2 biocircuits, CA2 biocircuit components, CA2 effector modules including their SREs or payloads of the present disclosure may be administered parenterally. Liquid dosage forms for oral and parenteral administration include, but are not limited to, pharmaceutically acceptable emulsions, microemulsions, solutions, suspensions, syrups, and/or elixirs. In addition to active ingredients, liquid dosage forms may comprise inert diluents commonly used in the art such as, for example, water or other solvents, solubilizing agents and emulsifiers such as ethyl alcohol, isopropyl alcohol, ethyl carbonate, ethyl acetate, benzyl alcohol, benzyl benzoate, propylene glycol, 1,3-butylene glycol, dimethylformamide, oils (in particular, cottonseed, groundnut, corn, germ, olive, castor, and sesame oils), glycerol, tetrahydrofurfuryl alcohol, polyethylene glycols and fatty acid esters of sorbitan, and mixtures thereof. Besides inert diluents, oral compositions can include adjuvants such as wetting agents, emulsifying and suspending agents, sweetening, flavoring, and/or perfuming agents. In certain embodiments for parenteral administration, compositions are mixed with solubilizing agents such as CREMOPHOR®, alcohols, oils, modified oils, glycols, polysorbates, cyclodextrins, polymers, and/or combinations thereof. In other embodiments, surfactants are included such as hydroxypropylcellulose.

[0382] Injectable preparations, for example, sterile injectable aqueous or oleaginous suspensions may be formulated according to the known art using suitable dispersing agents, wetting agents, and/or suspending agents. Sterile injectable preparations may be sterile injectable solutions, suspensions, and/or emulsions in nontoxic parenterally acceptable diluents and/or solvents, for example, as a solution in 1,3-butanediol. Among the acceptable vehicles and solvents that may be employed are water, Ringer's solution, U.S.P., and isotonic sodium chloride solution. Sterile, fixed oils are conventionally employed as a solvent or suspending medium. For this purpose, any bland fixed oil can be employed including synthetic mono- or diglycerides. Fatty acids such as oleic acid can be used in the preparation of injectables.

[0383] Injectable formulations may be sterilized, for example, by filtration through abacterial-retaining filter, and/or by incorporating sterilizing agents in the form of sterile solid compositions which can be dissolved or dispersed in sterile water or other sterile injectable medium prior to use.

[0384] In order to prolong the effect of active ingredients, it is often desirable to slow the absorption of active ingredients from subcutaneous or intramuscular injections. This may be accomplished by the use of liquid suspensions of crystalline or amorphous material with poor water solubility. The rate of absorption of active ingredients depends upon the rate of dissolution which, in turn, may depend upon crystal size and crystalline form. Alternatively, delayed absorption of a parenterally administered drug form is accomplished by dissolving or suspending the drug in an oil vehicle. Injectable depot forms are made by forming microencapsulated matrices of the drug in biodegradable polymers such as polylactide-polyglycolide. Depending upon the ratio of drug to polymer and the nature of the particular polymer employed, the rate of drug release can be controlled. Examples of other biodegradable polymers include poly(orthoesters) and poly(anhydrides). Depot injectable formulations are prepared by entrapping the drug in liposomes or microemulsions which are compatible with body tissues.

### Ophthalmic or Otic Administration

[0385] In some embodiments, pharmaceutical compositions, CA2 biocircuits, CA2 biocircuit components, CA2 effector modules including their SREs or payloads of the present disclosure may be prepared, packaged, and/or sold in formulations suitable for ophthalmic and/or otic administration. Such formulations may, for example, be in the form of eye and/or ear drops including, for example, a 0.1/1.0% (w/w) solution and/or suspension of the active ingredient in aqueous and/or oily liquid excipients. Such drops may further comprise buffering agents, salts, and/or one or more other of any additional ingredients described herein. Other ophthalmically-administrable formulations which are useful include those which comprise active ingredients in microcrystalline form and/or in liposomal preparations. Subretinal inserts may also be used as forms of administration.

### Detectable Agents and Labels

[0386] The stimuli, CA2 biocircuit systems and components, CA2 effector modules including the SREs and payloads may be associated with or bound to one or more radioactive agents or detectable agents.

[0387] These agents include various organic small molecules, inorganic compounds, nanoparticles, enzymes or enzyme substrates, fluorescent materials, luminescent materials (e.g., luminol), bioluminescent materials (e.g., luciferase, luciferin, and aequorin), chemiluminescent materials, radioactive materials (e.g., ¹⁸F, ⁶⁷Ga, ^{81m}Kr, ⁸²Rb, ¹¹¹In, ¹²³, ¹³³Xe, ²⁰¹Tl, ¹²⁵I, ³S ¹C, 3H, or ^{99m}Tc (e.g., as pertechnetate (technetate(VII), TcO₄)), and contrast agents (e.g., gold (e.g., gold nanoparticles), gadolinium (e.g., chelated Gd), iron oxides (e.g., superparamagnetic iron oxide (SPIO), monocrystalline iron oxide nanoparticles (MIONs), and ultrasmall superparamagnetic iron oxide (USPIO)), manganese chelates (e.g., Mn-DPDP), barium sulfate, iodinated contrast media (iohexol), microbubbles, or perfluorocarbons).

[0388] In some embodiments, the detectable agent may be a non-detectable precursor that becomes detectable upon activation (e.g., fluorogenic tetrazine-fluorophore constructs (e.g., tetrazine-BODIPY FL, tetrazine-Oregon Green 488, or tetrazine-BODIPY TMR-X) or enzyme activatable fluorogenic agents (e.g., PROSENSE® (VisEn Medical))). In vitro assays in which the enzyme labeled compositions can be used include, but are not limited to, enzyme linked immunosorbent assays (ELISAs), immunoprecipitation assays, immunofluorescence, enzyme immunoassays (EIA), radioimmunoassays (RIA), and Western blot analysis.

### Kits

[0389] The present disclosure includes a variety of kits for conveniently and/or effectively carrying out methods of the present disclosure. Typically, kits will comprise sufficient amounts and/or numbers of components to allow a user to perform one or multiple treatments of a subject(s) and/or to perform one or multiple experiments.

[0390] In one embodiment, the present disclosure provides kits for inhibiting genes in vitro or in vivo, comprising a CA2 biocircuit of the present disclosure or a combination of CA2 biocircuits of the present disclosure, optionally in combination with any other suitable active agents.

[0391] The kit may further comprise packaging and instructions and/or a delivery agent to form a formulation composition. The delivery agent may comprise, for example, saline, a buffered solution.

[0392] In additional embodiments, assay screening kits are provided. The kit includes a container for the screening assay. An instruction for the use of the assay and the information about the screening method are to be included in the kit.

### IV. Applications

[0393] The CA2 biocircuits, CA2 effector modules, SREs, stimuli, compositions or systems comprising one or more of the stimuli, CA2 biocircuits, CA2 effector modules of the present disclosure may be utilized in a large variety of applications including, but not limited to, therapeutics, diagnosis and prognosis, bioengineers, bioprocessing, biofactory, research agents, metabolomics, gene expression, enzyme replacement, etc.

### Therapeutic Uses

### Cancer Immunotherapy

[0394] Cancer immunotherapy aims at the induction or restoration of the reactivity of the immune system towards cancer. Significant advances in immunotherapy research have led to the development of various strategies which may broadly be classified into active immunotherapy and passive immunotherapy. In general, these strategies may be utilized to directly kill cancer cells or to counter the immunosuppressive tumor microenvironment. Active immunotherapy aims at induction of an endogenous, long-lasting tumor-antigen specific immune response. The response can further be enhanced by non-specific stimulation of immune response modifiers such as cytokines. In contrast, passive immunotherapy includes approaches where effector immune molecules such as tumor-antigen specific cytotoxic T cells or antibodies are administered to the host. This approach is short lived and requires multiple applications.

[0395] Despite significant advances, the efficacy of current immunotherapy strategies is limited by associated toxicities. These are often related to the narrow therapeutic window associated with immunotherapy, which in part, emerges from the need to push therapy dose to the edge of potentially fatal toxicity to get a clinically meaningful treatment effect. Further, dose expands in vivo since adoptively transferred immune cells continue to proliferate within the patient, often unpredictably.

[0396] A major risk involved in immunotherapy is the on-target but off tumor side effects resulting from T-cell activation in response to normal tissue expression of the tumor associated antigen (TAA). Clinical trials utilizing T cells expressing T-cell receptor against specific TAA reported skin rash, colitis and hearing loss in response to immunotherapy.

[0397] Immunotherapy may also produce on target, on-tumor toxicities that emerge when tumor cells are killed in response to the immunotherapy. The adverse effects include tumor lysis syndrome, cytokine release syndrome and the related macrophage activation syndrome. Importantly, these adverse effects may occur during the destruction of tumors, and thus even a successful on-tumor immunotherapy might result in toxicity. Approaches to regulatably control immunotherapy are thus highly desirable since they have the potential to reduce toxicity and maximize efficacy.

[0398] The present disclosure provides systems, compositions, immunotherapeutic agents and methods for cancer immunotherapy. These compositions provide tunable regulation of gene expression and function in immunotherapy. The present disclosure also provides CA2 biocircuit systems, CA2 effector modules, stimulus response elements (SREs) and payloads, as well as polynucleotides encoding any of the foregoing. In one aspect, the systems, compositions, immunotherapeutic agents and other components described herein can be controlled by a separately added stimulus, which provides a significant flexibility to regulate cancer immunotherapy. Further, the systems, compositions and the methods of the present disclosure may also be combined with therapeutic agents such as chemotherapeutic agents, small molecules, gene therapy, and antibodies.

[0399] The tunable nature of the systems and compositions described herein has the potential to improve the potency and duration of the efficacy of immunotherapies. Reversibly silencing the biological activity of adoptively transferred cells using compositions of the present disclosure allows maximizing the potential of cell therapy without irretrievably killing and terminating the therapy.

[0400] The present disclosure provides methods for fine tuning of immunotherapy after administration to patients. This in turn improves the safety and efficacy of immunotherapy and increases the subject population that may benefit from immunotherapy.

[0401] In one embodiment, the CA2 biocircuit systems, CA2 effector modules, SREs, and components that tune expression levels and activities of any agents may be used for immunotherapy. As non-limiting examples, an immunotherapeutic agent may be an antibody and fragments and variants thereof, a cancer specific T cell receptor (TCR) and variants thereof, an anti-tumor specific chimeric antigen receptor (CAR), a chimeric switch receptor, an inhibitor of a co-inhibitory receptor or ligand, an agonist of a co-stimulatory receptor and ligand, a cytokine, chemokine, a cytokine receptor, a chemokine receptor, a soluble growth factor, a metabolic factor, a suicide gene, a homing receptor, or any agent that induces an immune response in a cell and a subject.

[0402] In some embodiments, the composition for inducing an immune response may comprise an CA2 effector module. In some embodiments, the CA2 effector module may comprise a stimulus response element (SRE) operably linked to at least one payload. In one aspect, the payload may be an immunotherapeutic agent.

[0403] In some embodiments, CA2 biocircuit systems, CA2 effector modules, and compositions of the present disclosure relate to post-translational regulation of protein (payload) function anti-tumor immune responses of immunotherapeutic agents.

### 1. Adoptive Cell Transfer (Adoptive Immunotherapy)

[0404] In some embodiments, cells which are genetically modified to express at least one CA2 biocircuit system, CA2 effector module, SRE, and/or payload of interest (e.g., immunotherapeutic agent) may be used for adoptive cell therapy (ACT). As used herein, Adoptive cell transfer refers to the administration of immune cells (from autologous, allogenic or genetically modified hosts) with direct anticancer activity. ACT has shown promise in clinical application against malignant and infectious disease. For example, T cells genetically engineered to recognize CD19 have been used to treat follicular B cell lymphoma (Kochenderfer et al., Blood, 2010, 116:4099-4102; and Kochenderfer and Rosenberg, Nat Rev Clin Oncol., 2013, 10(5): 267-276) and ACT using autologous lymphocytes genetically-modified to express anti-tumor T cell receptors has been used to treat metastatic melanoma (Rosenberg and Dudley, Curr. Opin. Immunol. 2009, 21: 233-240).

[0405] According to the present disclosure, the CA2 biocircuits and systems may be used in the development and implementation of cell therapies such as adoptive cell therapy. Certain effector modules useful in cell therapy are given in FIGS. 7-12 in International Publication No. WO2017/180587, the contents of which are herein incorporated by reference in their entirety. The CA2 biocircuits, CA2 effector modules and their SREs and payloads may be used in cell therapies to effect CAR therapies, in the manipulation or regulation of TILs, in allogeneic cell therapy, in combination T cell therapy with other treatment lines (e.g. radiation, cytokines), to encode engineered TCRs, or modified TCRs, or to enhance T cells other than TCRs (e.g. by introducing cytokine genes, genes for the checkpoint inhibitors PD1, CTLA4).

[0406] Provided herein are methods for use in adoptive cell therapy. The methods involve preconditioning a subject in need thereof, modulating immune cells with SRE, CA2 biocircuits and compositions of the present disclosure, administering to a subject, engineered immune cells expressing compositions described herein and the successful engraftment of engineered cells within the subject.

[0407] In some embodiments, SREs, CA2 biocircuits and compositions of the present disclosure may be used to minimize preconditioning regimens associated with adoptive cell therapy. As used herein “preconditioning” refers to any therapeutic regimen administered to a subject to improve the outcome of adoptive cell therapy. Preconditioning strategies include but are not limited to total body irradiation and/or lymphodepleting chemotherapy. Adoptive therapy clinical trials without preconditioning have failed to demonstrate any clinical benefit, indicating its importance in ACT. Yet, preconditioning is associated with significant toxicity and limits the subject cohort that is suitable for ACT. In some instances, immune cells for ACT may be engineered to express cytokines such as IL12 and IL15 as payload using SREs of the present disclosure to reduce the need for preconditioning (Pengram et al. (2012) Blood 119 (18): 4133-41; the contents of which are incorporated by reference in their entirety).

[0408] In some embodiments, immune cells for ACT may be dendritic cells, T cells such as CD8^{T} T cells and CD4+ T cells, natural killer (NK) cells, NK T cells, Cytotoxic T lymphocytes (CTLs), tumor infiltrating lymphocytes (TILs), lymphokine activated killer (LAK) cells, memory T cells, regulatory T cells (Tregs), helper T cells, cytokine-induced killer (CIK) cells, and any combination thereof. In other embodiments, immune stimulatory cells for ACT may be generated from embryonic stem cell (ESC) and induced pluripotent stem cell (iPSC). In some embodiments, autologous or allogeneic immune cells are used for ACT.

[0409] In some embodiments, cells used for ACT may be T cells engineered to express CARs comprising an antigen-binding domain specific to an antigen on tumor cells of interest. In other embodiments, cells used for ACT may be NK cells engineered to express CARs comprising an antigen-binding domain specific to an antigen on tumor cells of interest. In addition to adoptive transfer of genetically modified T cells (e.g., CAR T cells) for immunotherapy, alternate types of CAR-expressing leukocytes, either alone, or in combination with CAR T cells may be used for adoptive immunotherapy. In one example, a mixture of T cells and NK cells may be used for ACT. The expression level of CARs in T cells and NK cells, according to the present disclosure, is tuned and controlled by a small molecule that binds to the DD(s) operably linked to the CAR in the CA2 effector module.

[0410] In some embodiments, the CARs of the present disclosure may be placed under the transcriptional control of the T cell receptor alpha constant (TRAC) locus in the T cells to achieve uniform CAR expression while enhancing T cell potency. The TRAC locus may be disrupted using the CRISPR/Cas 9, zinc finger nucleases (ZFNs), TALENs followed by the insertion of the CAR construct. Methods of engineering CAR constructs directed to the TRAC locus are described in Eyquem J. et al (2017) Nature. 543(7643):113-117 (the contents of which are incorporated herein by reference in their entirety).

[0411] In some embodiments, NK cells engineered to express the present compositions may be used for ACT. NK cell activation induces perforin/granzyme-dependent apoptosis in target cells. NK cell activation also induces cytokine secretion such as IFN γ, TNF-α and GM-CSF. These cytokines enhance the phagocytic function of macrophages and their antimicrobial activity and augment the adaptive immune response via up-regulation of antigen presentation by antigen presenting cells such as dendritic cells (DCs) (Reviewed by Vivier et al., Nat. Immunol., 2008, 9(5): 503-510).

[0412] Other examples of genetic modification may include the introduction of chimeric antigen receptors (CARs) and the down-regulation of inhibitory NK cell receptors such as NKG2A.

[0413] NK cells may also be genetically reprogrammed to circumvent NK cell inhibitory signals upon interaction with tumor cells. For example, using CRISPR, ZFN, or TALEN to genetically modify NK cells to silence their inhibitory receptors may enhance the anti-tumor capacity of NK cells.

[0414] Immune cells can be isolated and expanded ex vivo using a variety of methods known in the art. For example, methods of isolating and expanding cytotoxic T cells are described in U.S. Pat. Nos. 6,805,861 and 6,531,451; US Patent Publication NO. US20160348072A1 and International Patent Publication NO. WO2016168595A1; the contents of each of which are incorporated herein by reference in their entirety. Isolation and expansion of NK cells is described in US Patent Publication NO. US20150152387A1, U.S. Pat. No. 7,435,596; and Oyer, J. L. (2016). Cytotherapy. 18(5):653-63; the contents of each of which are incorporated by reference herein in its entirety. Specifically, human primary NK cells may be expanded in the presence of feeder cells e.g. a myeloid cell line that has been genetically modified to express membrane bound IL15, IL21, IL12 and 4-1BBL.

[0415] In some instances, sub populations of immune cells may be enriched for ACT. Methods for immune cell enrichment are taught in International Patent Publication NO. WO2015039100A1. In another example, T cells positive for B and T lymphocyte attenuator marker BTLA) may be used to enrich for T cells that are anti-cancer reactive as described in U.S. Pat. No. 9,512,401 (the content of each of which are incorporated herein by reference in their entirety).

[0416] In some embodiments, immune cells for ACT may be depleted of select sub populations to enhance T cell expansion. For example, immune cells may be depleted of Foxp3+ T lymphocytes to minimize the anti-tumor immune response using methods taught in US Patent Publication NO. US 20160298081A1; the contents of which are incorporated by reference herein in their entirety.

[0417] In some embodiments, activation and expansion of T cells for ACT is achieved antigenic stimulation of a transiently expressed Chimeric Antigen Receptor (CAR) on the cell surface. Such activation methods are taught in International Patent NO. WO2017015427, the content of which are incorporated herein by reference in their entirety.

[0418] In some embodiments, immune cells may be activated by antigens associated with antigen presenting cells (APCs). In some embodiments, the APCs may be dendritic cells, macrophages or B cells that are antigen specific or nonspecific. The APCs may be autologous or homologous in their organ. In some embodiments, the APCs may be artificial antigen presenting cells (aAPCs) such as cell based aAPCs or acellular aAPCs. Cell based aAPCs may be selected from either genetically modified allogeneic cells such as human erythroleukemia cells or xenogeneic cells such as murine fibroblasts and Drosophila cells. Alternatively, the APCs maybe be acellular wherein the antigens or costimulatory domains are presented on synthetic surfaces such as latex beads, polystyrene beads, lipid vesicles or exosomes.

[0419] In some embodiments, cells described herein, specifically T cells may be expanded using artificial cell platforms. In one embodiment, the mature T cells may be generated using artificial thymic organoids (ATOs) described by Seet C S et al. 2017. Nat Methods. 14, 521-530 (the contents of which are incorporated herein by reference in their entirety). ATOs are based on a stromal cell line expressing delta like canonical notch ligand (DLL1). In this method, stromal cells are aggregated with hematopoietic stem and progenitor cells by centrifugation and deployed on a cell culture insert at the air-fluid interface to generate organoid cultures. ATO-derived T cells exhibit naive phenotypes, a diverse T cell receptor (TCR) repertoire and TCR-dependent function.

[0420] In some embodiments, adoptive cell therapy is carried out by autologous transfer, wherein the cells are derived from a subject in need of a treatment and the cells, following isolation and processing are administered to the same subject. In other instances, ACT may involve allogenic transfer wherein the cells are isolated and/or prepared from a donor subject other than the recipient subject who ultimately receives cell therapy. The donor and recipient subject may be genetically identical, or similar or may express the same HLA class or subtype.

[0421] In some embodiments, the multiple immunotherapeutic agents introduced into the immune cells for ACT (e.g., T cells and NK cells) may be controlled by the same CA2 biocircuit system. In other embodiments, the multiple immunotherapeutic agents introduced into the immune cells for ACT (e.g., T cells and NK cells) may be controlled by different biocircuit systems. In another example, a suicide gene and a CAR construct may be linked to two separate effector modules.

[0422] Following genetic modulation using SREs, CA2 biocircuits and compositions described herein, cells are administered to the subject in need thereof. Methods for administration of cells for adoptive cell therapy are known and may be used in connection with the provided methods and compositions. For example, adoptive T cell therapy methods are described, e.g., in US Patent Application Publication No. 2003/0170238 to Gruenberg et al; U.S. Pat. No. 4,690,915 to Rosenberg; Rosenberg (2011) Nat Rev Clin Oncol. 8(10):577-85). See, e.g., Themeli et al. (2013) Nat Biotechnol. 31(10): 928-933; Tsukahara et al. (2013) Biochem Biophys Res Commun 438(1): 84-9; Davila et al. (2013) PLoS ONE 8(4): e61338; the contents of each of which are incorporated herein by reference in their entirety.

[0423] In some embodiments, immune cells for ACT may be modified to express one or more immunotherapeutic agents which facilitate immune cells activation, infiltration, expansion, survival and anti-tumor functions. The immunotherapeutic agents may be a second CAR or TCR specific to a different target molecule; a cytokine or a cytokine receptor; a chimeric switch receptor that converts an inhibitory signal to a stimulatory signal; a homing receptor that guides adoptively transferred cells to a target site such as the tumor tissue; an agent that optimizes the metabolism of the immune cell; or a safety switch gene (e.g., a suicide gene) that kills activated T cells when a severe event is observed after adoptive cell transfer or when the transferred immune cells are no-longer needed.

[0424] In some embodiments, immune cells used for adoptive cell transfer can be genetically manipulated to improve their persistence, cytotoxicity, tumor targeting capacity, and ability to home to disease sites in vivo, with the overall aim of further improving upon their capacity to kill tumors in cancer patients. One example is to introduce CA2 effector modules described herein comprising cytokines such as gamma-cytokines (IL2 and IL15) into immune cells to promote immune cell proliferation and survival. Transduction of cytokine genes (e.g., gamma-cytokines IL2 and IL15) into cells will be able to propagate immune cells without addition of exogenous cytokines and cytokine expressing NK cells have enhanced tumor cytotoxicity.

[0425] In some embodiments, CA2 biocircuits, SREs or CA2 effector modules may be utilized to prevent T cell exhaustion. As used herein, “T cell exhaustion” refers to the stepwise and progressive loss of T cell function caused by chronic T cell activation. T cell exhaustion is a major factor limiting the efficacy of antiviral and antitumor immunotherapies. Exhausted T cells have low proliferative and cytokine producing capabilities concurrent with high rates of apoptosis and high surface expression of multiple inhibitory receptors. T cell activation leading to exhaustion may occur either in the presence or absence of the antigen.

[0426] In some embodiments, the CA2 biocircuits, and their components may be utilized to prevent T cell exhaustion in the context of Chimeric Antigen Receptor-T cell therapy (CAR-T). In this context, exhaustion in some instances, may be caused by the oligomerization of the scFvs of the CAR on the cell surface which leads to continuous activation of the intracellular domains of the CAR. As a non-limiting example, CARs of the present disclosure may include scFvs that are unable to oligomerize. As another non-limiting example, CARs that are rapidly internalized and re-expressed following antigen exposure may also be selected to prevent chronic scFv oligomerization on cell surface. In one embodiment, the framework region of the scFvs may be modified to prevent constitutive CAR signaling (Long et al. 2014. Cancer Research. 74(19) S1; the contents of which are incorporated by reference in their entirety). Tunable CA2 biocircuit systems of the present disclosure may also be used to regulate the surface expression of the CAR on the T cell surface to prevent chronic T cell activation. The CARs described herein may also be engineered to minimize exhaustion. As a non-limiting example, the 41-BB signaling domain may be incorporated into CAR design to ameliorate T cell exhaustion. In some embodiments, any of the strategies disclosed by Long H A et al. may be utilized to prevent exhaustion (Long A H et al. (2015) Nature Medicine 21, 581-590; the contents of which are incorporated herein by reference in their entirety).

[0427] In some embodiments, the tunable nature of the CA2 biocircuits of the present disclosure may be utilized to reverse human T cell exhaustion observed with tonic CAR signaling. Reversibly silencing the biological activity of adoptively transferred cells using compositions of the present disclosure may be used to reverse tonic signaling which, in turn, may reinvigorate the T cells. Reversal of exhaustion may be measured by the downregulation of multiple inhibitory receptors associated with exhaustion.

[0428] In some embodiments, T cell metabolic pathways may be modified to diminish the susceptibility of T cells to exhaustion. Metabolic pathways may include, but are not limited to glycolysis, urea cycle, citric acid cycle, beta oxidation, fatty acid biosynthesis, pentose phosphate pathway, nucleotide biosynthesis, and glycogen metabolic pathways. As a non-limiting example, payloads that reduce the rate of glycolysis may be utilized to restrict or prevent T cell exhaustion (Long et al. Journal for Immunotherapy of Cancer 2013, 1(Suppl 1): P21; the contents of which are incorporated by reference in their entirety). In one embodiment, T cells of the present disclosure may be used in combination with inhibitors of glycolysis such as 2-deoxyglucose, and rapamycin.

[0429] In some embodiments, CA2 effector modules of the present disclosure, useful for immunotherapy may be placed under the transcriptional control of the T cell receptor alpha locus constant (TRAC) locus in the T cells. Eyquem et al. have shown that expression of the CAR from the TRAC locus prevents T cell exhaustion and the accelerated differentiation of T cells caused by excessive T cell activation (Eyquem J. et al (2017) Nature. 543(7643):113-117; the contents of which are incorporated herein by reference in their entirety).

[0430] In some embodiments, payloads described herein may be used in conjunction with antibodies or fragments that target T cell surface markers associated with T cell exhaustion. T-cell surface markers associated with T cell exhaustion that may be used include, but are not limited to, CTLA-1, PD-1, TGIT, LAG-3, 2B4, BTLA, TIM3, VISTA, and CD96.

[0431] In one embodiment, the payload described herein may be a CD276 CAR (with CD28, 4-IBB, and CD3 zeta intracellular domains), that does not show an upregulation of the markers associated with early T cell exhaustion (see International patent publication No. WO2017044699; the contents of which are incorporated by reference in their entirety).

[0432] In some embodiments, the compositions of the present disclosure may be utilized to alter TIL (tumor infiltrating lymphocyte) populations in a subject. In one embodiment, any of the payloads described herein may be utilized to change the ratio of CD4 positive cells to CD8 positive populations. In some embodiments, TILs may be sorted ex vivo and engineered to express any of the cytokines described herein. Payloads described herein may be used to expand CD4 and/or CD8 populations of TILs to enhance TIL mediated immune response. 2. Cancer vaccines

[0433] In some embodiments, CA2 biocircuits, CA2 effector modules, payloads of interest (e.g., immunotherapeutic agents), vectors, cells and compositions of the present disclosure may be used in conjunction with cancer vaccines.

[0434] In some embodiments, cancer vaccine may comprise peptides and/or proteins derived from tumor associated antigen (TAA). Such strategies may be utilized to evoke an immune response in a subject, which in some instances may be a cytotoxic T lymphocyte (CTL) response. Peptides used for cancer vaccines may also modified to match the mutation profile of a subject. For example, EGFR derived peptides with mutations matched to the mutations found in the subject in need of therapy have been successfully used in patients with lung cancer (Li F et al. (2016) Oncoimmunology. October 7; 5(12): e1238539; the contents of which are incorporated herein by reference in their entirety).

[0435] In one embodiment, cancer vaccines of the present disclosure may be superagonist altered peptide ligands (APL) derived from TAAs. These are mutant peptide ligands that deviate from the native peptide sequence by one or more amino acids, which activate specific CTL clones more effectively than native epitopes. These alterations may allow the peptide to bind better to the restricting Class I MHC molecule or interact more favorably with the TCR of a given tumor-specific CTL subset. APLs may be selected using methods taught in US Patent Publication NO. US20160317633A1, the contents of which are incorporated herein by reference in their entirety.

### 3. Combination Treatments

[0436] In some embodiments, it is desirable to combine compositions, vectors and cells described herein for administration to a subject. Compositions described herein comprising different immunotherapeutic agents may be used in combination for enhancement of immunotherapy.

[0437] In some embodiments, it is desirable to combine compositions described herein with adjuvants, that can enhance the potency and longevity of antigen-specific immune responses. Adjuvants used as immunostimulants in combination therapy include biological molecules or delivery carriers that deliver antigens. As non-limiting examples, the compositions of the present disclosure may be combined with biological adjuvants such as cytokines, Toll Like Receptors, bacterial toxins, and/or saponins. In other embodiments, the compositions of the present disclosure may be combined with delivery carriers. Exemplary delivery carriers include, polymer microspheres, immune stimulating complexes, emulsions (oil-in-water or water-in-oil), aluminum salts, liposomes or virosomes.

[0438] In some embodiments, effector immune cells modified to express CA2 biocircuits, CA2 effector modules, SREs and payloads described herein may be combined with the biological adjuvants described herein. Dual regulation of CAR and cytokines and ligands to segregate the kinetic control of target-mediated activation from intrinsic cell T cell expansion. Such dual regulation also minimizes the need for pre-conditioning regimens in patients.

[0439] In some embodiments, effector immune cells modified to express one or more antigen-specific TCRs or CARs may be combined with compositions described herein comprising immunotherapeutic agents that convert the immunosuppressive tumor microenvironment.

[0440] In one aspect, effector immune cells modified to express CARs specific to different target molecules on the same cell may be combined. In another aspect, different immune cells modified to express the same CAR construct such as NK cells and T cells may be used in combination for a tumor treatment, for instance, a T cell modified to express a CD19 CAR may be combined with a NK cell modified to express the same CD19 CAR to treat B cell malignancy.

[0441] In other embodiments, immune cells modified to express CARs may be combined with checkpoint blockade agents.

[0442] In some embodiments, effector immune cells modified to expressed CA2 biocircuits, CA2 effector modules, SREs and payloads described herein may be combined with cancer vaccines described herein.

[0443] In some embodiments, methods of the present disclosure may include combination of the compositions of the present disclosure with other agents effective in the treatment of cancers, infectious diseases and other immunodeficient disorders, such as anti-cancer agents. As used herein, the term “anti-cancer agent” refers to any agent which is capable of negatively affecting cancer in a subject, for example, by killing cancer cells, inducing apoptosis in cancer cells, reducing the growth rate of cancer cells, reducing the incidence or number of metastases, reducing tumor size, inhibiting tumor growth, reducing the blood supply to a tumor or cancer cells, promoting an immune response against cancer cells or a tumor, preventing or inhibiting the progression of cancer, or increasing the lifespan of a subject with cancer.

[0444] In some embodiments, anti-cancer agent or therapy may be a chemotherapeutic agent, or radiotherapy, immunotherapeutic agent, surgery, or any other therapeutic agent which, in combination with the present disclosure, improves the therapeutic efficacy of treatment.

[0445] In one embodiment, a CA2 effector module comprising a CD19 CAR may be used in combination with amino pyrimidine derivatives such as the Burkitt's tyrosine receptor kinase (BTK) inhibitor using methods taught in International Patent Application NO. WO2016164580, the contents of which are incorporated herein by reference in their entirety.

[0446] In some embodiments, compositions of the present disclosure may be used in combination with immunotherapeutics other than the inventive therapy described herein, such as antibodies specific to some target molecules on the surface of a tumor cell.

[0447] Exemplary chemotherapies include, without limitation, Acivicin; Aclarubicin; Acodazole hydrochloride; Acronine; Adozelesin; Aldesleukin; Altretamine; Ambomycin; Ametantrone acetate; Amsacrine; Anastrozole; Anthramycin; Asparaginase; Asperrin, Sulindac, Curcumin, alkylating agents including: Nitrogen mustards such as mechlor-ethamine, cyclophosphamide, ifosfamide, melphalan and chlorambucil; nitrosoureas such as carmustine (BC U), lomustine (CCNU), and semustine (methyl-CC U); thylenimines/methylmelamine such as thriethylenemelamine (TEM), triethylene, thiophosphoramide (thiotepa), hexamethylmelamine (HMM, altretamine); alkyl sulfonates such as busulfan; triazines such as dacarbazine (DTIC); antimetabolites including folic acid analogs such as methotrexate and trimetrexate, pyrrolidine analogs such as 5-fluorouracil, fluorodeoxyuridine, gemcitabine, cytosine arabinoside (AraC, cytarabine), 5-azacytidine, 2,2′-difluorodeoxycytidine, purine analogs such as 6-mercaptopurine, 6-thioguanine, azathioprine, 2′-deoxycoformycin (pentostatin), erythrohydroxynonyladenine (EHNA), fludarabine phosphate, and 2-chlorodeoxyadenosine (cladribine, 2-CdA); natural products including antimitotic drugs such as paclitaxel, vinca alkaloids including vinblastine (VLB), vincristine, and vinorelbine, taxotere, estramustine, and estramustine phosphate; epipodophylotoxins such as etoposide and teniposide; antibiotics, such as actimomycin D, daunomycin (rubidomycin), doxorubicin, mitoxantrone, idarubicin, bleomycins, plicamycin (mithramycin), mitomycinC, and actinomycin; enzymes such as L-asparaginase, cytokines such as interferon (IFN)-gamma, tumor necrosis factor (TNF)-alpha, TNF-beta and GM-CSF, anti-angiogenic factors, such as angiostatin and endostatin, inhibitors of FGF or VEGF such as soluble forms of receptors for angiogenic factors, including soluble VGF/VEGF receptors, platinum coordination complexes such as cisplatin and carboplatin, anthracenediones such as mitoxantrone, substituted urea such as hydroxyurea, methylhydrazine derivatives including N-methylhydrazine (MIFf) and procarbazine, adrenocortical suppressants such as mitotane (o,ρ′-DDD) and aminoglutethimide; hormones and antagonists including adrenocorticosteroid antagonists such as prednisone and equivalents, dexamethasone and aminoglutethimide; progestin such as hydroxyprogesterone caproate, medroxyprogesterone acetate and megestrol acetate; estrogen such as diethylstilbestrol and ethinyl estradiol equivalents; antiestrogen such as tamoxifen; androgens including testosterone propionate and fluoxymesterone/equivalents; antiandrogens such as flutamide, gonadotropin-releasing hormone analogs and leuprolide; non-steroidal antiandrogens such as flutamide; kinase inhibitors, histone deacetylase inhibitors, methylation inhibitors, proteasome inhibitors, monoclonal antibodies, oxidants, anti-oxidants, telomerase inhibitors, BH3 mimetics, ubiquitin ligase inhibitors, stat inhibitors and receptor tyrosin kinase inhibitors such as imatinib mesylate (marketed as Gleevac or Glivac) and erlotinib (an EGF receptor inhibitor) now marketed as Tarveca; anti-virals such as oseltamivir phosphate, Amphotericin B, and palivizumab; Sdi 1 mimetics; Semustine; Senescence derived inhibitor 1; Sparfosic acid; Spicamycin D; Spiromustine; Splenopentin; Spongistatin 1; Squalamine; Stipiamide; Stromelysin inhibitors; Sulfinosine; Superactive vasoactive intestinal peptide antagonist; Velaresol; Veramine; Verdins; Verteporfin; Vinorelbine; Vinxaltine; Vitaxin; Vorozole; Zanoterone; Zeniplatin; Zilascorb; and Zinostatin stimalamer; PI3Kβ small-molecule inhibitor, GSK2636771; pan-PI3K inhibitor (BKM120); BRAF inhibitors. Vemurafenib (Zelboraf) and dabrafenib (Tafinlar); or any analog or derivative and variant of the foregoing.

[0448] Radiotherapeutic agents and factors include radiation and waves that induce DNA damage for example, γ-irradiation, X-rays, UV-irradiation, microwaves, electronic emissions, radioisotopes, and the like. Therapy may be achieved by irradiating the localized tumor site with the above described forms of radiations. It is most likely that all of these factors effect a broad range of damage DNA, on the precursors of DNA, the replication and repair of DNA, and the assembly and maintenance of chromosomes. Dosage ranges for X-rays range from daily doses of 50 to 200 roentgens for prolonged periods of time (3 to 4 weeks), to single doses of 2000 to 6000 roentgens. Dosage ranges for radioisotopes vary widely, and depend on the half-life of the isotope, the strength and type of radiation emitted, and the uptake by the neoplastic cells.

[0449] In some embodiments, the chemotherapeutic agent may be an immunomodulatory agent such as lenalidomide (LEN). Recent studies have demonstrated that lenalidomide can enhance antitumor functions of CAR modified T cells (Otahal et al., Oncoimmunology, 2015, 5(4): e1115940). Some examples of anti-tumor antibodies include tocilizumab, siltuximab.

[0450] Other agents may be used in combination with compositions of the present disclosure may also include, but not limited to, agents that affect the upregulation of cell surface receptors and their ligands such as Fas/Fas ligand, DR4 or DR5/TRAIL and GAP junctions, cytostatic and differentiation agents, inhibitors of cell adhesion such as focal adhesion kinase (FAKs) inhibitors and Lovastatin, or agents that increase the sensitivity of the hyper proliferative cells to apoptotic inducers such as the antibody C225.

[0451] The combinations may include administering the compositions of the present disclosure and other agents at the same time or separately. Alternatively, the present immunotherapy may precede or follow the other agent/therapy by intervals ranging from minutes, days, weeks to months.

### 4. Diseases

[0452] Provided in the present disclosure is a method of reducing a tumor volume or burden in a subject in need, the method comprising introducing into the subject a composition described herein.

[0453] The present disclosure also provides methods for treating a cancer in a subject, comprising administering to the subject an effective amount of an effector immune cell genetically modified to express at least one CA2 effector module described herein.

### Cancer

[0454] Various cancers may be treated with pharmaceutical compositions, CA2 biocircuits, CA2 biocircuit components, CA2 effector modules including their SREs or payloads of the present disclosure. As used herein, the term “cancer” refers to any of various malignant neoplasms characterized by the proliferation of anaplastic cells that tend to invade surrounding tissue and metastasize to new body sites and also refers to the pathological condition characterized by such malignant neoplastic growths. Cancers may be tumors or hematological malignancies, and include but are not limited to, all types of lymphomas/leukemias, carcinomas and sarcomas, such as those cancers or tumors found in the anus, bladder, bile duct, bone, brain, breast, cervix, colon/rectum, endometrium, esophagus, eye, gallbladder, head and neck, liver, kidney, larynx, lung, mediastinum (chest), mouth, ovaries, pancreas, penis, prostate, skin, small intestine, stomach, spinal marrow, tailbone, testicles, thyroid and uterus.

[0455] Types of carcinomas which may be treated with the compositions of the present disclosure include, but are not limited to, papilloma/carcinoma, choriocarcinoma, endodermal sinus tumor, teratoma, adenoma/adenocarcinoma, melanoma, fibroma, lipoma, leiomyoma, rhabdomyoma, mesothelioma, angioma, osteoma, chondroma, glioma, lymphoma/leukemia, squamous cell carcinoma, small cell carcinoma, large cell undifferentiated carcinomas, basal cell carcinoma and sinonasal undifferentiated carcinoma.

[0456] Types of sarcomas which may be treated with the compositions of the present disclosure include, but are not limited to, soft tissue sarcoma such as alveolar soft part sarcoma, angiosarcoma, dermatofibrosarcoma, desmoid tumor, desmoplastic small round cell tumor, extraskeletal chondrosarcoma, extraskeletal osteosarcoma, fibrosarcoma, hemangiopericytoma, hemangiosarcoma, Kaposi's sarcoma, leiomyosarcoma, liposarcoma, lymphangiosarcoma, lymphosarcoma, malignant fibrous histiocytoma, neurofibrosarcoma, rhabdomyosarcoma, synovial sarcoma, and Askin's tumor, Ewing's sarcoma (primitive neuroectodermal tumor), malignant hemangioendothelioma, malignant schwannoma, osteosarcoma, and chondrosarcoma.

[0457] As a non-limiting example, the carcinoma which may be treated may be Acute granulocytic leukemia, Acute lymphocytic leukemia, Acute myelogenous leukemia, Adenocarcinoma, Adenosarcoma, Adrenal cancer, Adrenocortical carcinoma, Anal cancer, Anaplastic astrocytoma, Angiosarcoma, Appendix cancer, Astrocytoma, Basal cell carcinoma, B-Cell lymphoma), Bile duct cancer, Bladder cancer, Bone cancer, Bowel cancer, Brain cancer, Brain stem glioma, Brain tumor, Breast cancer, Carcinoid tumors, Cervical cancer, Cholangiocarcinoma, Chondrosarcoma, Chronic lymphocytic leukemia, Chronic myelogenous leukemia, Colon cancer, Colorectal cancer, Craniopharyngioma, Cutaneous lymphoma, Cutaneous melanoma, Diffuse astrocytoma, Ductal carcinoma in situ, Endometrial cancer, Ependymoma, Epithelioid sarcoma, Esophageal cancer, Ewing sarcoma, Extrahepatic bile duct cancer, Eye cancer, Fallopian tube cancer, Fibrosarcoma, Gallbladder cancer, Gastric cancer, Gastrointestinal cancer, Gastrointestinal carcinoid cancer, Gastrointestinal stromal tumors, General, Germ cell tumor, Glioblastoma multiforme, Glioma, Hairy cell leukemia, Head and neck cancer, Hemangioendothelioma, Hodgkin lymphoma, Hodgkin's disease, Hodgkin's lymphoma, Hypopharyngeal cancer, Infiltrating ductal carcinoma, Infiltrating lobular carcinoma, Inflammatory breast cancer, Intestinal Cancer, Intrahepatic bile duct cancer, Invasive/infiltrating breast cancer, Islet cell cancer, Jaw cancer, Kaposi sarcoma, Kidney cancer, Laryngeal cancer, Leiomyosarcoma, Leptomeningeal metastases, Leukemia, Lip cancer, Liposarcoma, Liver cancer, Lobular carcinoma in situ, Low-grade astrocytoma, Lung cancer, Lymph node cancer, Lymphoma, Male breast cancer, Medullary carcinoma, Medulloblastoma, Melanoma, Meningioma, Merkel cell carcinoma, Mesenchymal chondrosarcoma, Mesenchymous, Mesothelioma, Metastatic breast cancer, Metastatic melanoma, Metastatic squamous neck cancer, Mixed gliomas, Mouth cancer, Mucinous carcinoma, Mucosal melanoma, Multiple myeloma, Nasal cavity cancer, Nasopharyngeal cancer, Neck cancer, Neuroblastoma, Neuroendocrine tumors, Non-Hodgkin lymphoma, Non-Hodgkin's lymphoma, Non-small cell lung cancer, Oat cell cancer, Ocular cancer, Ocular melanoma, Oligodendroglioma, Oral cancer, Oral cavity cancer, Oropharyngeal cancer, Osteogenic sarcoma, Osteosarcoma, Ovarian cancer, Ovarian epithelial cancer, Ovarian germ cell tumor, Ovarian primary peritoneal carcinoma, Ovarian sex cord stromal tumor, Paget's disease, Pancreatic cancer, Papillary carcinoma, Paranasal sinus cancer, Parathyroid cancer, Pelvic cancer, Penile cancer, Peripheral nerve cancer, Peritoneal cancer, Pharyngeal cancer, Pheochromocytoma, Pilocytic astrocytoma, Pineal region tumor, Pineoblastoma, Pituitary gland cancer, Primary central nervous system lymphoma, Prostate cancer, Rectal cancer, Renal cell cancer, Renal pelvis cancer, Rhabdomyosarcoma, Salivary gland cancer, Sarcoma, Sarcoma, bone, Sarcoma, soft tissue, Sarcoma, uterine, Sinus cancer, Skin cancer, Small cell lung cancer, Small intestine cancer, Soft tissue sarcoma, Spinal cancer, Spinal column cancer, Spinal cord cancer, Spinal tumor, Squamous cell carcinoma, Stomach cancer, Synovial sarcoma, T-cell lymphoma), Testicular cancer, Throat cancer, Thymoma/thymic carcinoma, Thyroid cancer, Tongue cancer, Tonsil cancer, Transitional cell cancer, Transitional cell cancer, Transitional cell cancer, Triple-negative breast cancer, Tubal cancer, Tubular carcinoma, Ureteral cancer, Ureteral cancer, Urethral cancer, Uterine adenocarcinoma, Uterine cancer, Uterine sarcoma, Vaginal cancer, and Vulvar cancer.

### Infectious Diseases

[0458] In some embodiments, CA2 biocircuits described herein may be used for the treatment of infectious diseases. CA2 biocircuits of the present disclosure may be introduced in cells suitable for adoptive cell transfer such as macrophages, dendritic cells, natural killer cells, and or T cells. Infectious diseases treated by the CA2 biocircuits of the present disclosure may be diseases caused by viruses, bacteria, fungi, and/or parasites. IL15-IL15Ra payloads of the present disclosure may be used to increase immune cell proliferation and/or persistence of the immune cells useful in treating infectious diseases.

[0459] “Infectious diseases” herein refer to diseases caused by any pathogen or agent that infects mammalian cells, preferably human cells and causes a disease condition. Examples thereof include bacteria, yeast, fungi, protozoans, mycoplasma, viruses, prions, and parasites. Examples include those involved in (a) viral diseases such as, for example, diseases resulting from infection by an adenovirus, a herpesvirus (e.g., HSV-I, HSV-II, CMV, or VZV), a poxvirus (e-g-, an orthopoxvirus such as variola or vaccinia, or molluscum contagiosum), a picornavirus (e.g., rhinovirus or enterovirus), an orthomyxovirus (e.g., influenzavirus), a paramyxovirus (e.g., parainfluenza virus, mumps virus, measles virus, and respiratory syncytial virus (RSV)), a coronavirus (e.g., SARS), a papovavirus (e.g., papillomaviruses, such as those that cause genital warts, common warts, or plantar warts), a hepadnavirus (e.g., hepatitis B virus), a flavivirus (e.g., hepatitis C virus or Dengue virus), or a retrovirus (e.g., a lentivirus such as HIV); (b) bacterial diseases such as, for example, diseases resulting from infection by bacteria of, for example, the genus Escherichia, Enterobacter, Salmonella, Staphylococcus, Shigella, Listeria, Aerobacter, Helicobacter, Klebsiella, Proteus, Pseudomonas, Streptococcus, Chlamydia, Mycoplasma, Pneumococcus, Neisseria, Clostridium, Bacillus, Corynebacterium, Mycobacterium, Campylobacter, Vibrio, Serratia, Providencia, Chromobacterium, Brucella, Yersinia, Haemophilus, or Bordetella; (c) other infectious diseases, such chlamydia, fungal diseases including but not limited to candidiasis, aspergillosis, histoplasmosis, cryptococcal meningitis, parasitic diseases including but not limited to malaria, Pneumocystis carnii pneumonia, leishmaniasis, cryptosporidiosis, toxoplasmosis, and trypanosome infection and prions that cause human disease such as Creutzfeldt-Jakob Disease (CJD), variant Creutzfeldt-Jakob Disease (vCJD), Gerstmann-Straassler-Scheinker syndrome, Fatal Familial Insomnia and kuru.

### Combination Treatments

[0460] The present disclosure further relates to the use of pharmaceutical compositions, CA2 biocircuits, CA2 biocircuit components, CA2 effector modules including their SREs or payloads of the present disclosure for treating one or more forms of cancer, in combination with other pharmaceuticals and/or other therapeutic methods, e.g., with known pharmaceuticals and/or known therapeutic methods, such as, for example, those which are currently employed for treating these disorders. For example, the pharmaceutical compositions, CA2 biocircuits, CA2 biocircuit components, CA2 effector modules including their SREs or payloads of the present disclosure can also be administered in conjunction with one or more additional anti-cancer treatments, such as biological, chemotherapy and radiotherapy. Accordingly, a treatment can include, for example, imatinib (Gleevac), all-trans-retinoic acid, a monoclonal antibody treatment (gemtuzumab, ozogamicin), chemotherapy (for example, chlorambucil, prednisone, prednisolone, vincristine, cytarabine, clofarabine, farnesyl transferase inhibitors, decitabine, inhibitors of MDR1), rituximab, interferon-α, anthracycline drugs (such as daunorubicin or idarubicin), L-asparaginase, doxorubicin, cyclophosphamide, doxorubicin, bleomycin, fludarabine, etoposide, pentostatin, or cladribine), bone marrow transplant, stem cell transplant, radiation therapy, anti-metabolite drugs (methotrexate and 6-mercaptopurine), or any of the antibodies taught in Table 5 of International Publication No. WO2017/180587 (the contents of which are herein incorporated by reference in their entirety) or combinations thereof.

Combinations with Radiation

[0461] Radiation therapy (also called radiotherapy, X-ray therapy, or irradiation) is the use of ionizing radiation to kill cancer cells and shrink tumors. Radiation therapy can be administered externally via external beam radiotherapy (EBRT) or internally via brachytherapy. The effects of radiation therapy are localized and confined to the region being treated. Radiation therapy may be used to treat almost every type of solid tumor, including cancers of the brain, breast, cervix, larynx, lung, pancreas, prostate, skin, stomach, uterus, or soft tissue sarcomas. Radiation is also used to treat leukemia and lymphoma.

Combination with Chemotherapy

[0462] Chemotherapy is the treatment of cancer with drugs that can destroy cancer cells. In current usage, the term “chemotherapy” usually refers to cytotoxic drugs which affect rapidly dividing cells in general, in contrast with targeted therapy. Chemotherapy drugs interfere with cell division in various possible ways, e.g. with the duplication of DNA or the separation of newly formed chromosomes. Most forms of chemotherapy target all rapidly dividing cells and are not specific to cancer cells, although some degree of specificity may come from the inability of many cancer cells to repair DNA damage, while normal cells generally can.

[0463] Most chemotherapy regimens are given in combination. Exemplary chemotherapeutic agents include, but are not limited to, 5-FU Enhancer, 9-AC, AG2037, AG3340, Aggrecanase Inhibitor, Aminoglutethimide, Amsacrine (m-AMSA), Asparaginase, Azacitidine, Batimastat (BB94), BAY 12-9566, BCH-4556, Bis-Naphtalimide, Busulfan, Capecitabine, Carboplatin, Carmustaine+Polifepr Osan, cdk4/cdk2 inhibitors, Chlorombucil, CI-994, Cisplatin, Cladribine, CS-682, Cytarabine HCl, D2163, Dactinomycin, Daunorubicin HCl, DepoCyt, Dexifosamide, Docetaxel, Dolastain, Doxifluridine, Doxorubicin, DX8951f, E 7070, EGFR, Epirubicin, Erythropoietin, Estramustine phosphate sodium, Etoposide (VP16-213), Farnesyl Transferase Inhibitor, FK 317, Flavopiridol, Floxuridine, Fludarabine, Fluorouracil (5-FU), Flutamide, Fragyline, Gemcitabine, Hexamethylmelamine (HMM), Hydroxyurea (hydroxycarbamide), Ifosfamide, Interferon Alfa-2a, Interferon Alfa-2b, Interleukin-2, Irinotecan, ISI 641, Krestin, Lemonal DP 2202, Leuprolide acetate (LHRH-releasing factor analogue), Levamisole, LiGLA (lithium-gamma linolenate), Lodine Seeds, Lometexol, Lomustine (CCNU), Marimistat, Mechlorethamine HCl (nitrogen mustard), Megestrol acetate, Meglamine GLA, Mercaptopurine, Mesna, Mitoguazone (methyl-GAG; methyl glyoxal bis-guanylhydrazone; MGBG), Mitotane (o.p′-DDD), Mitoxantrone, Mitoxantrone HCl, MMI 270, MMP, MTA/LY 231514, Octreotide, ODN 698, OK-432, Oral Platinum, Oral Taxoid, Paclitaxel (TAXOL®), PARP Inhibitors, PD 183805, Pentostatin (2′ deoxycoformycin), PKC 412, Plicamycin, Procarbazine HCl, PSC 833, Ralitrexed, RAS Farnesyl Transferase Inhibitor, RAS Oncogene Inhibitor, Semustine (methyl-CCNU), Streptozocin, Suramin, Tamoxifen citrate, Taxane Analog, Temozolomide, Teniposide (VM-26), Thioguanine, Thiotepa, Topotecan, Tyrosine Kinase, UFT (Tegafur/Uracil), Valrubicin, Vinblastine sulfate, Vindesine sulfate, VX-710, VX-853, YM 116, ZD 0101, ZD 0473/Anormed, ZD 1839, ZD 9331.

### Immuno-Oncology and Cell Therapies

[0464] Recent progress in the field of cancer immunology has allowed the development of several approaches to help the immune system keep the cancer at bay. Such immunotherapy approaches include the targeting of cancer antigens through monoclonal antibodies or through adoptive transfer of ex vivo engineered T cells (e.g., which contain chimeric antigen receptors or engineered T cell receptors).

[0465] In some embodiments, pharmaceutical compositions, CA2 biocircuits, CA2 biocircuit components, CA2 effector modules including their SREs or payloads of the present disclosure may be used in the modulation or alteration or exploitation of the immune system to target one or more cancers. This approach may also be considered with other such biological approaches, e.g., immune response modifying therapies such as the administration of interferons, interleukins, colony-stimulating factors, other monoclonal antibodies, vaccines, gene therapy, and nonspecific immunomodulating agents are also envisioned as anti-cancer therapies to be combined with the pharmaceutical compositions, CA2 biocircuits, CA2 biocircuit components, CA2 effector modules including their SREs or payloads of the present disclosure.

[0466] Cancer immunotherapy refers to a diverse set of therapeutic strategies designed to induce the patient's own immune system to fight the cancer. In some embodiments, pharmaceutical compositions, CA2 biocircuits, CA2 biocircuit components, CA2 effector modules including their SREs or payloads of the present disclosure are designed as immuno-oncology therapeutics.

### Cell Therapies

[0467] There are several types of cellular immunotherapies, including tumor infiltrating lymphocyte (TIL) therapy, genetically engineered T cells bearing chimeric antigen receptors (CARs), and recombinant TCR technology.

[0468] According to the present disclosure, the CA2 biocircuits and systems may be used in the development and implementation of cell therapies such as adoptive cell therapy. Certain effector modules useful in cell therapy are given in FIGS. 8-13 of the International Publication WO2017/180587 (the contents each of which are herein incorporated by reference in their entirety). The CA2 biocircuits, CA2 effector modules and their SREs and payloads may be used in cell therapies to effect TCR removal-TCR gene disruption, TCR engineering, to regulate epitope tagged receptors, in APC platforms for stimulating T cells, as a tool to enhance ex vivo APC stimulation, to improve methods of T cell expansion, in ex vivo stimulation with antigen, in TCR/CAR combinations, in the manipulation or regulation of TILs, in allogeneic cell therapy, in combination T cell therapy with other treatment lines (e.g. radiation, cytokines), to encode engineered TCRs, or modified TCRs, or to enhance T cells other than TCRs (e.g. by introducing cytokine genes, genes for the checkpoint inhibitors PD1, CTLA4).

[0469] In some embodiments, improved response rates are obtained in support of cell therapies.

[0470] Expansion and persistence of cell populations may be achieved through regulation or fine tuning of the payloads, e.g., the receptors or pathway components in T cells, NK cells or other immune-related cells. In some embodiments, CA2 biocircuits, their components, SREs or CA2 effector modules are designed to spatially and/or temporally control the expression of proteins which enhance T-cell or NK cell response. In some embodiments, CA2 biocircuits, SREs or CA2 effector modules are designed to spatially and/or temporally control the expression of proteins which inhibit T-cell or NK cell response.

[0471] In some embodiments, CA2 biocircuits, SREs or CA2 effector modules are designed to reshape the tumor microenvironment to extend utility of the biocircuit or a pharmaceutical composition beyond direct cell killing.

[0472] In some embodiments, CA2 biocircuits, SREs or CA2 effector modules are designed to reduce, mitigate or eliminate the CAR cytokine storm. In some embodiments, such reduction, mitigation and/or elimination occurs in solid tumors or tumor microenvironments.

[0473] In some embodiments, the CA2 effector modules may encode one or more cytokines.

[0474] In one aspect, the CA2 effector module of the present disclosure may be a CA2 DD-CD40L polypeptide. Regulatable DD-CD40L polypeptide may be directly used as an immunotherapeutic agent or be transduced into an effector immune cell (T cells and TIL cells) to generate modified T cells with greater in vivo expansion and survival capabilities for adoptive cell transfer. The need for harsh preconditioning regimens in current adoptive cell therapies may be minimized using regulated CA2 DD-CD40L to modify tumor microenvironment and increase persistence in solid tumors that are currently refractory to tumor antigen targeted therapy. In some embodiments, CAR expressing T cells may be armored with DD regulated CD40L to relieve immunosuppression without systemic toxicity.

[0475] The immune system can be harnessed for the treatment of diseases beyond cancer. CA2 biocircuits, their components, SREs or CA2 effector modules may be utilized in immunotherapy for the treatment of diseases including, but not limited to, autoimmune diseases, allergies, graft versus host disease, and diseases and disorders that may result in immunodeficiency such as acquired immune deficiency syndrome (AIDS).

[0476] In some embodiments, payloads of the present disclosure may be a chimeric antigen receptor (CAR), which when transduced into immune cells (e.g., T cells and NK cells), can re-direct the immune cells against the target (e.g., a tumor cell) which expresses a molecule recognized by the extracellular target moiety of the CAR.

[0477] As used herein, the term “chimeric antigen receptor (CAR)” refers to a synthetic receptor that mimics the TCR on the surface of T cells. In general, a CAR is composed of an extracellular targeting domain, a transmembrane domain/region and an intracellular signaling/activation domain. In a standard CAR receptor, the components: the extracellular targeting domain, transmembrane domain and intracellular signaling/activation domain, are linearly constructed as a single fusion protein. The extracellular region comprises a targeting domain/moiety (e.g., a scFv) that recognizes a specific tumor antigen or other tumor cell-surface molecules. The intracellular region may contain a signaling domain of TCR complex (e.g., the signal region of CD3ζ, and/or one or more costimulatory signaling domains, such as those from CD28, 4-1BB (CD137) and OX-40 (CD134). For example, a “first-generation CAR” only has the CD3ζ signaling domain, whereas, a second-generation CARs has a CD3ζ signal domain plus one costimulatory signaling domain, and a third-generation CARs having CD3ζ signal domain plus two or more costimulatory signaling domains. A CAR, when expressed by a T cell, endows the T cell with antigen specificity determined by the extracellular targeting moiety of the CAR. It is also desirable to add one or more elements such as homing and suicide genes to develop a more competent and safer architecture of CAR, which has given rise to the so called the fourth-generation CAR.

[0478] In some embodiments, the extracellular targeting domain is joined through the hinge (also called space domain or spacer) and transmembrane regions to an intracellular signaling domain. The hinge may need to be varied to optimize the potency of CAR expressing cells towards the cancer cells due to the size of the target protein where the targeting moiety binds, and the size and affinity of the targeting domain itself. Upon recognition and binding of the targeting moiety to the target cell, the intracellular signaling domain leads to an activation signal for the CAR T cell, which is further amplified by the “second signal” from one or more intracellular costimulatory domains. The CAR T cell, once activated, can destroy the target cell.

[0479] According to the present disclosure, the payload of the present disclosure may be a first-generation CAR, or a second-generation CAR, or a third-generation CAR, or a fourth-generation CAR. Representative effector module embodiments comprising CAR constructs are illustrated in FIG. 13-18 of International Publication No. WO2017/180587 (the contents of which are herein incorporated by reference in their entirety).

[0480] In accordance with the present disclosure, the extracellular target moiety of a CAR may be any agent that recognizes and binds to a given target molecule, for example, a neoantigen on tumor cells, with high specificity and affinity. The target moiety may be an antibody and variants thereof that specifically bind to a target molecule on tumor cells, or a peptide aptamer selected from a random sequence pool based on its ability to bind to the target molecule on tumor cells, or a variant or fragment thereof that can bind to the target molecule on tumor cells, or an antigen recognition domain from native T-cell receptor (TCR) (e.g. CD4 extracellular domain to recognize HIV infected cells), or exotic recognition components such as a linked cytokine that leads to recognition of target cells bearing the cytokine receptor, or a natural ligand of a receptor.

[0481] In some embodiments, the targeting moiety of a CAR construct may be a natural ligand of the target molecule, or a variant and/or fragment thereof capable of binding the target molecule. In some aspects, the targeting moiety of a CAR may be a receptor of the target molecule.

[0482] In some embodiments, the targeting moiety of a CAR may recognize a tumor specific antigen (TSA), for example a cancer neoantigen whose expression is restricted to tumor cells.

[0483] As non-limiting examples, the CAR of the present disclosure may comprise the extracellular targeting domain capable of binding to a tumor specific antigen selected from 5T4, 707-AP, A33, AFP (α-fetoprotein), AKAP-4 (A kinase anchor protein 4), ALK, α5β1-integrin, androgen receptor, annexin II, alpha-actinin-4, ART-4, B1, B7H3, B7H4, BAGE (B melanoma antigen), BCMA, BCR-ABL fusion protein, beta-catenin, BKT-antigen, BTAA, CA-I (carbonic anhydrase I), CA50 (cancer antigen 50), CA125, CA15-3, CA195, CA242, calretinin, CAIX (carbonic anhydrase), CAMEL (cytotoxic T-lymphocyte recognized antigen on melanoma), CAM43, CAP-1, Caspase-8/m, CD4, CD5, CD7, CD19, CD20, CD22, CD23, CD25, CD27, CD27/m, CD28, CD30, CD33, CD34, CD36, CD38, CD40/CD154, CD41, CD44v6, CD44v7/8, CD45, CD49f, CD56, CD68KP1, CD74, CD79a/CD79b, CD103, CD123, CD133, CD138, CD171, cdc27/m, CDK4 (cyclin dependent kinase 4), CDKN2A, CDS, CEA (carcinoembryonic antigen), CEACAM5, CEACAM6, chromogranin, c-Met, c-Myc, coa-1, CSAp, CT7, CT10, cyclophilin B, cyclin B1, cytoplasmic tyrosine kinases, cytokeratin, DAM-10, DAM-6, dek-can fusion protein, desmin, DEPDCl (DEP domain containing 1), E2A-PRL, EBNA, EGF-R (epidermal growth factor receptor), EGP-1 (epithelial glycoprotein-1) (TROP-2), EGP-2, EGP-40, EGFR (epidermal growth factor receptor), EGFRvIII, EF-2, ELF2M, EMMPRIN, EpCAM (epithelial cell adhesion molecule), EphA2, Epstein Barr virus antigens, Erb (ErbB1; ErbB3; ErbB4), ETA (epithelial tumor antigen), ETV6-AML1 fusion protein, FAP (fibroblast activation protein), FBP (folate-binding protein), FGF-5, folate receptor c, FOS related antigen 1, fucosyl GM1, G250, GAGE (GAGE-1; GAGE-2), galactin, GD2 (ganglioside), GD3, GFAP (glial fibrillary acidic protein), GM2 (oncofetal antigen-immunogenic-1; OFA-I-1), GnT-V, Gp100, H4-RET, HAGE (helicase antigen), HER-2/neu, HIFs (hypoxia inducible factors), HIF-1α, HIF-2α, HLA-A2, HLA-A*0201-R170I, HLA-A11, HMWMAA, Hom/Mel-40, HSP70-2M (Heat shock protein 70), HST-2, HTgp-175, hTERT (or hTRT), human papillomavirus-E6/human papillomavirus-E7 and E6, iCE (immune-capture EIA), IGF-1R, IGH-IGK, IL2R, IL5, ILK (integrin-linked kinase), IMP3 (insulin-like growth factor II mRNA-binding protein 3), IRF4 (interferon regulatory factor 4), KDR (kinase insert domain receptor), KIAA0205, KRAB-zinc finger protein (KID)-3; KID31, KSA (17-1A), K-ras, LAGE, LCK, LDLR/FUT (LDLR-fucosyltransferaseAS fusion protein), LeY (Lewis Y), MAD-CT-1, MAGE (tyrosinase, melanoma-associated antigen) (MAGE-1; MAGE-3), melan-A tumor antigen (MART), MART-2/Ski, MCiR (melanocortin 1 receptor), MDM2, mesothelin, MPHOSPHI, MSA (muscle-specific actin), mTOR (mammalian targets of rapamycin), MUC-1, MUC-2, MUM-1 (melanoma associated antigen (mutated) 1), MUM-2, MUM-3, Myosin/m, MYL-RAR, NA88-A, N-acetylglucosaminyltransferase, neo-PAP, NF-KB (nuclear factor-kappa B), neurofilament, NSE (neuron-specific enolase), Notch receptors, NuMa, N-Ras, NY-BR-1, NY-CO-1, NY-ESO-1, Oncostatin M, OS-9, OY-TES1, p53 mutants, p190 minor bcr-abl, p15(58), p185erbB2, p180erbB-3, PAGE (prostate associated gene), PAP (prostatic acid phosphatase), PAX3, PAX5, PDGFR (platelet derived growth factor receptor), cytochrome P450 involved in piperidine and pyrrolidine utilization (PIPA), Pml-RAR alpha fusion protein, PR-3 (proteinase 3), PSA (prostate specific antigen), PSM, PSMA (Prostate stem cell antigen), PRAME (preferentially expressed antigen of melanoma), PTPRK, RAGE (renal tumor antigen), Raf (A-Raf, B-Raf and C-Raf), Ras, receptor tyrosine kinases, RCAS1, RGSS, RORI (receptor tyrosine kinase-like orphan receptor 1), RU1, RU2, SAGE, SART-1, SART-3, SCP-1, SDCCAG16, SP-17 (sperm protein 17), src-family, SSX (synovial sarcoma X breakpoint)-1, SSX-2 (HOM-MEL-40), SSX-3, SSX-4, SSX-5, STAT-3, STAT-5, STAT-6, STEAD, STn, survivin, syk-ZAP70, TA-90 (Mac-2 binding protein\cyclophilin C-associated protein), TAAL6, TACSTD1 (tumor associated calcium signal transducer 1), TACSTD2, TAG-72-4, TAGE, TARP (T cell receptor gamma alternate reading frame protein), TEL/AML1 fusion protein, TEM1, TEM8 (endosialin or CD248), TGFβ, TIE2, TLP, TMPRSS2 ETS fusion gene, TNF-receptor (TNF-α receptor, TNF-0 receptor; or TNF-γ receptor), transferrin receptor, TPS, TRP-1 (tyrosine related protein 1), TRP-2, TRP-2/INT2, TSP-180, VEGF receptor, WNT, WT-1 (Wilm's tumor antigen) and XAGE.

[0484] As non-limiting examples, the targeting moiety of the present disclosure may be a scFv antibody that recognizes a tumor specific antigen (TSA), for example scFvs of antibodies SS, SS1 and HN1 that specifically recognize and bind to human mesothelin (U.S. Pat. No. 9,359,447), scFv of antibody of GD2 (U.S. Pat. No. 9,315,585), a CD19 antigen binding domain (U.S. Pat. No. 9,328,156); a NKG2D ligand binding domain (U.S. Pat. No. 9,273,283; US patent publication NO.: US20160311906A1); human anti-mesothelin scFvs comprising the amino acid sequences of SEQ ID NO.: 11 and 12 of U.S. Pat. No. 9,272,002; an anti-CS1 binding agent (US patent publication NO.: US20160075784); an anti-BCMA binding domain (International Patent Publication NO.: WO2016/014565); anti-CD19 scFv antibody of SEQ ID NO.: 20 in U.S. Pat. No. 9,102,761; GFR alpha 4 antigen binding fragments having the amino acid sequences of SEQ ID NOs.: 59 and 79 of International patent publication NO.: 2016/025880; anti-CLL-1 (C-type lectin-like molecule 1) binding domains having the amino acid sequences of SEQ ID NO.:47, 44, 48, 49, 50, 39, 40, 41, 42, 43, 45, 46, 51, 73, 70, 74, 75, 76, 65, 66, 67, 68, 69, 71, 72, 77, 195, 86, 83, 87, 88, 89, 78, 79, 80, 81, 82, 84, 85, 90 and 196 of International Patent Publication NO.: WO2016014535); CD33 binding domains having the amino acid sequences of SEQ ID NOs.: 39-46 of International patent publication NO.: WO2016014576; a GPC3 (glypican-3) binding domain (SEQ ID NO.: 2 and SEQ ID NO.: 4 of International patent publication NO.: WO2016036973); a GFR alpha4 (Glycosylphosphatidylinositol (GPI)-linked GDNF family α-receptor 4 cell-surface receptor) binding domain (International Patent Publication NO.: WO2016025880); CD123 binding domains having the amino acid sequences of SEQ ID NOs.: 480, 483, 485, 478, 158, 159, 160, 157, 217, 218, 219, 216, 276, 277, 278, and 275 of International patent publication NO.: WO20160258896; an anti-RORI antibody or fragments thereof (International patent publication NO.: WO2016016344); scFvs specific to GPC-3 (SEQ ID NOs.: 1 and 24 of International patent publication NO.: WO2016049459); scFv for CSPG4 (SEQ ID NO.: 2 of International patent publication NO.: WO2015080981; scFv for folate receptor alpha (US Patent Publication NO.: US20170002072A1); the contents of each of which are incorporated herein by reference in their entirety.

[0485] The intracellular domain of a CAR fusion polypeptide, after binding to its target molecule, transmits a signal to the effector immune cell, activating at least one of the normal effector functions of effector immune cells, including cytolytic activity (e.g., cytokine secretion) or helper activity. Therefore, the intracellular domain comprises an “intracellular signaling domain” of a T cell receptor (TCR). In some embodiments, the intracellular signaling domain of the present disclosure may contain signaling motifs which are known as immunoreceptor tyrosine-based activation motifs (ITAMs). In some embodiments, the intracellular region of the present disclosure further comprises one or more costimulatory signaling domains which provide additional signals to the effector immune cells. These costimulatory signaling domains, in combination with the signaling domain can further improve expansion, activation, memory, persistence, and tumor-eradicating efficiency of CAR engineered immune cells (e.g., CAR T cells). In some cases, the costimulatory signaling region contains 1, 2, 3, or 4 cytoplasmic domains of one or more intracellular signaling and/or costimulatory molecules.

[0486] In one embodiment of the present disclosure, the CAR of the present disclosure is a CD19 specific CAR. In the context of the present disclosure, a CA2 effector module may comprise an CA2 DD operably linked to a CD19 CAR fusion construct.

[0487] In some embodiments, pharmaceutical compositions, CA2 biocircuits, CA2 biocircuit components, CA2 effector modules including their SREs or payloads of the present disclosure may be used in the modulation or alteration or exploitation of the immune system to target one or more self-reactive immune components such as auto antibodies and self-reactive immune cells to attenuate autoimmune diseases. In some embodiments, the SREs of the present disclosure may be utilized in regulating or tuning the Chimeric Auto Antibody Receptor (CAAR) based T cell therapy in order to optimize its utility in the treatment of autoimmune diseases (Ellebrecht C. T. et al., Science. 2016 Jul. 8; 353(6295):179-84; the contents of which are incorporated herein by reference in their entirety). In some embodiments, CA2 biocircuits, SREs or CA2 effector modules are designed to modulate Tregs to attenuate autoimmune disorders.

[0488] In some embodiments, CA2 biocircuits, SREs or CA2 effector modules may be utilized in immunotherapy-based treatments to attenuate or mitigate Graft vs. Host disease (GVHD). GVHD refers to a condition following stem cell or bone marrow transplant where in the allogeneic donor immune cells react against host tissue. In some embodiments, CA2 biocircuits, SREs or CA2 effector modules are designed to modulate Tregs for the treatment of GVHD. In one embodiment, CA2 biocircuits containing a CA2 effector module encoding TNF-alpha may be used to modulate Tregs to minimize GVHD (Pierini, A. et al., Blood. 2016 Aug. 11; 128(6):866-71; the contents of which are incorporated herein by reference in their entirety).

[0489] In some embodiments, CA2 biocircuits, SREs or CA2 effector modules are designed to be significantly less immunogenic than other biocircuits or switches in the art.

[0490] As used herein, “significantly less immunogenic” refers to a detectable decrease in immunogenicity. In another embodiment, the term refers to a fold decrease in immunogenicity. In another embodiment, the term refers to a decrease such that an effective amount of the CA2 biocircuits, SREs or CA2 effector modules which can be administered without triggering a detectable immune response. In another embodiment, the term refers to a decrease such that the CA2 biocircuits, SREs or CA2 effector modules can be repeatedly administered without eliciting an immune response. In another embodiment, the decrease is such that the CA2 biocircuits, SREs or CA2 effector modules can be repeatedly administered without eliciting an immune response.

[0491] In another embodiment, the CA2 biocircuits, SREs or CA2 effector modules is 2-fold less immunogenic than its unmodified counterpart or reference compound. In another embodiment, immunogenicity is reduced by a 3-fold factor. In another embodiment, immunogenicity is reduced by a 5-fold factor. In another embodiment, immunogenicity is reduced by a 7-fold factor. In another embodiment, immunogenicity is reduced by a 10-fold factor. In another embodiment, immunogenicity is reduced by a 15-fold factor. In another embodiment, immunogenicity is reduced by a fold factor. In another embodiment, immunogenicity is reduced by a 50-fold factor. In another embodiment, immunogenicity is reduced by a 100-fold factor. In another embodiment, immunogenicity is reduced by a 200-fold factor. In another embodiment, immunogenicity is reduced by a 500-fold factor. In another embodiment, immunogenicity is reduced by a 1000-fold factor. In another embodiment, immunogenicity is reduced by a 2000-fold factor. In another embodiment, immunogenicity is reduced by another fold difference.

[0492] Methods of determining immunogenicity are well known in the art, and include, e.g. measuring secretion of cytokines (e.g. IL12, IFN alpha, TNF-alpha, RANTES, MIP-1alpha or beta, IL6, IFN-beta, or IL8), measuring expression of DC activation markers (e.g. CD83, HLA-DR, CD80 and CD86), or measuring ability to act as an adjuvant for an adaptive immune response.

### Diseases and Toxins

[0493] Various infectious diseases may be treated with pharmaceutical compositions, CA2 biocircuits, CA2 biocircuit components, CA2 effector modules including their SREs or payloads of the present disclosure. As used herein, the term “infectious disease” refers to any disorders caused by organisms such as bacteria, viruses, fungi or parasites.

[0494] Various toxins may be treated with pharmaceutical compositions, CA2 biocircuits, CA2 biocircuit components, CA2 effector modules including their SREs or payloads of the present disclosure. Non-limited examples of toxins include Ricin, Bacillus anthracis, Shiga toxin and Shiga-like toxin, Botulinum toxins.

[0495] Various tropical diseases may be treated with pharmaceutical compositions, CA2 biocircuits, CA2 biocircuit components, CA2 effector modules including their SREs or payloads of the present disclosure. Non-limited examples of tropical diseases include Chikungunya fever, Dengue fever, Chagas disease, Rabies, Malaria, Ebola virus, Marburg virus, West Nile Virus, Yellow Fever, Japanese encephalitis virus, St. Louis encephalitis virus.

[0496] Various foodborne illnesses and gastroenteritis may be treated with pharmaceutical compositions, CA2 biocircuits, CA2 biocircuit components, CA2 effector modules including their SREs or payloads of the present disclosure. Non-limited examples of foodborne illnesses and gastroenteritis include Rotavirus, Norwalk virus (Norovirus), Campylobacter jejuni, Clostridium difficile, Entamoeba histolytica, Helicobacter pyloni, Enterotoxin B of Staphylococcus aureus, Hepatitis A virus (HAV), Hepatitis E, Listeria monocytogenes, Salmonella, Clostridium perfringens, and Salmonella.

[0497] Various infectious agents may be treated with pharmaceutical compositions, CA2 biocircuits, CA2 biocircuit components, CA2 effector modules including their SREs or payloads of the present disclosure. Non-limited examples of infectious agents include adenoviruses, Anaplasma phagocytophilium, Ascaris lumbricoides, Bacillus anthracis, Bacillus cereus, Bacteroides sp, Barmah Forest virus, Bartonella bacilliformis, Bartonella henselae, Bartonella quintana, beta-toxin of Clostridium perfringens, Bordetella pertussis, Bordetella parapertussis, Borrelia burgdorferi, Borrelia miyamotoi, Borrelia recurrentis, Borrelia sp., Botulinum toxin, Brucella sp., Burkholderia pseudomallei, California encephalitis virus, Campylobacter, Candida albicans, chikungunya virus, Chlamydia psittaci, Chlamydia trachomatis, Clonorchis sinensis, Clostridium difficile bacteria, Clostridium tetani, Colorado tick fever virus, Corynebacterium diphtheriae, Corynebacterium minutissimum, Coxiella burnetii, coxsackie A, coxsackie B, Crimean-Congo hemorrhagic fever virus, cytomegalovirus, dengue virus, Eastern Equine encephalitis virus, Ebola viruses, echovirus, Ehrlichia chaffeensis., Ehrlichia equi., Ehrlichia sp., Entamoeba histolytica, Enterobacter sp., Enterococcus faecalis, Enterovirus 71, Epstein-Barr virus (EBV), Erysipelothrix rhusiopathiae, Escherichia coli, Flavivirus, Fusobacterium necrophorum, Gardnerella vaginalis, Group B streptococcus, Haemophilus aegyptius, Haemophilus ducreyi, Haemophilus influenzae, hantavirus, Helicobacter pylori, Hepatitis A, Hepatitis B, Hepatitis C, Hepatitis D, Hepatitis E, herpes simplex virus 1 and 2, human herpes virus 6, human herpes Virus 8, human immunodeficiency virus 1 and 2, human T-cell leukemia viruses I and II, influenza viruses (A, B, C), Jamestown Canyon virus, Japanese encephalitis antigenic, Japanese encephalitis virus, John Cunninham virus, juninvirus, Kaposi's Sarcoma-associated Herpes Virus (KSHV), Klebsiella granulomatis, Klebsiella sp., Kyasanur Forest Disease virus, La Crosse virus, Lassavirus, Legionella pneumophila, Leptospira interrogans, Listeria monocytogenes, lymphocytic choriomeningitis virus, lyssavirus, Machupovirus, Marburg virus, measles virus, MERS coronavirus (MERS-CoV), Micrococcus sedentarius, Mobiluncus sp., Molluscipoxvirus, Moraxella catarrhalis, Morbilli-Rubeola virus, Mumpsvirus, Mycobacterium leprae, Mycobacterium tuberculosis, Mycobacterium ulcerans, Mycoplasma genitalium, Mycoplasma sp, Nairovirus, Neisseria gonorrhoeae, Neisseria meningitidis, Nocardia, Norwalk virus, norovirus, Omsk hemorrhagic fever virus, papilloma virus, parainfluenza viruses 1-3, parapoxvirus, parvovirus B19, Peptostreptococccus sp., Plasmodium sp., polioviruses types I, II, and III, Proteus sp., Pseudomonas aeruginosa, Pseudomonas pseudomallei, Pseudomonas sp., rabies virus, respiratory syncytial virus, ricin toxin, Rickettsia australis, Rickettsia conori, Rickettsia honei, Rickettsia prowazekii, Ross River Virus, rotavirus, rubellavirus, Saint Louis encephalitis, Salmonella Typhi, Sarcoptes scabiei, SARS-associated coronavirus (SARS-CoV), Serratia sp., Shiga toxin and Shiga-like toxin, Shigella sp., Sin Nombre Virus, Snowshoe hare virus, Staphylococcus aureus, Staphylococcus epidermidis, Streptobacillus monilformis, Streptococcus pneumoniae, Streptococcus agalactiae, Streptococcus agalactiae, Streptococcus group A-H, Streptococcus pneumoniae, Streptococcus pyogenes, Treponema pallidum subsp. Pallidum, Treponema pallidum var. carateum, Treponema pallidum var. endemicum, Tropheryma whippelii, Ureaplasma urealyticum, Varicella-Zoster virus, variola virus, Vibrio cholerae, West Nile virus, yellow fever virus, Yersinia enterocolitica, Yersinia pestis, and Zika virus.

[0498] Various rare diseases may be treated with pharmaceutical compositions, CA2 biocircuits, CA2 biocircuit components, CA2 effector modules including their SREs or payloads of the present disclosure. As used herein, the term “rare disease” refers to any disease that affects a small percentage of the population.

[0499] Various autoimmune diseases and autoimmune-related diseases may be treated with pharmaceutical compositions, CA2 biocircuits, CA2 biocircuit components, CA2 effector modules including their SREs or payloads of the present disclosure. As used herein, the term “autoimmune disease” refers to a disease in which the body produces antibodies that attack its own tissues. As a non-limiting example, the autoimmune disease may be Acute Disseminated Encephalomyelitis (ADEM), Acute necrotizing hemorrhagic leukoencephalitis, Addison's disease, Agammaglobulinemia, Alopecia areata, Amyloidosis, Ankylosing spondylitis, Anti-GBM/Anti-TBM nephritis, Antiphospholipid syndrome (APS), Autoimmune angioedema, Autoimmune aplastic anemia, Autoimmune dysautonomia, Autoimmune hepatitis, Autoimmune hyperlipidemia, Autoimmune immunodeficiency, Autoimmune inner ear disease (AIED), Autoimmune myocarditis, Autoimmune oophoritis, Autoimmune pancreatitis, Autoimmune retinopathy, Autoimmune thrombocytopenic purpura (ATP), Autoimmune thyroid disease, Autoimmune urticaria, Axonal & neuronal neuropathies, Balo disease, Behcet's disease, Bullous pemphigoid, Cardiomyopathy, Castleman disease, Celiac disease, Chagas disease, Chronic fatigue syndrome, Chronic inflammatory demyelinating polyneuropathy (CIDP), Chronic recurrent multifocal ostomyelitis (CRMO), Churg-Strauss syndrome, Cicatricial pemphigoid/benign mucosal pemphigoid, Crohn's disease, Cogans syndrome, Cold agglutinin disease, Congenital heart block, Coxsackie myocarditis, CREST disease, Essential mixed cryoglobulinemia, Demyelinating neuropathies, Dermatitis herpetiformis, Dermatomyositis, Devic's disease (neuromyelitis optica), Discoid lupus, Dressler's syndrome, Endometriosis, Eosinophilic esophagitis, Eosinophilic fasciitis, Erythema nodosum, Experimental allergic encephalomyelitis, Evans syndrome, Fibromyalgia, Fibrosing alveolitis, Giant cell arteritis (temporal arteritis), Giant cell myocarditis, Glomerulonephritis, Goodpasture's syndrome, Granulomatosis with Polyangiitis (GPA) (formerly called Wegener's Granulomatosis), Graves' disease, Guillain-Barre syndrome, Hashimoto's encephalitis, Hashimoto's thyroiditis, Hemolytic anemia, Henoch-Schonlein purpura, Herpes gestationis, Hypogammaglobulinemia, Idiopathic thrombocytopenic purpura (ITP), IgA nephropathy, IgG4-related sclerosing disease, Immunoregulatory lipoproteins, Inclusion body myositis, Interstitial cystitis, Juvenile arthritis, Juvenile diabetes (Type 1 diabetes), Juvenile myositis, Kawasaki syndrome, Lambert-Eaton syndrome, Leukocytoclastic vasculitis, Lichen planus, Lichen sclerosis, Ligneous conjunctivitis, Linear IgA disease (LAD), Lupus (SLE), Lyme disease, chronic, Meniere's disease, Microscopic polyangiitis, Mixed connective tissue disease (MCTD), Mooren's ulcer, Mucha-Habermann disease, Multiple sclerosis, Myasthenia gravis, Myositis, Narcolepsy, Neuromyelitis optica (Devic's), Neutropenia, Ocular cicatricial pemphigoid, Optic neuritis, Palindromic rheumatism, PANDAS (Pediatric Autoimmune Neuropsychiatric Disorders Associated with Streptococcus), Paraneoplastic cerebellar degeneration, Paroxysmal nocturnal hemoglobinuria (PNH), Parry Romberg syndrome, Parsonnage-Turner syndrome, Pars planitis (peripheral uveitis), Pemphigus, Peripheral neuropathy, Perivenous encephalomyelitis, Pernicious anemia, POEMS syndrome, Polyarteritis nodosa, Type I, II, & III autoimmune polyglandular syndromes, Polymyalgia rheumatica, Polymyositis, Postmyocardial infarction syndrome, Postpericardiotomy syndrome, Progesterone dermatitis, Primary biliary cirrhosis, Primary sclerosing cholangitis, Psoriasis, Psoriatic arthritis, Idiopathic pulmonary fibrosis, Pyoderma gangrenosum, Pure red cell aplasia, Raynauds phenomenon, Reactive Arthritis, Reflex sympathetic dystrophy, Reiter's syndrome, Relapsing polychondritis, Restless legs syndrome, Retroperitoneal fibrosis, Rheumatic fever, Rheumatoid arthritis, Sarcoidosis, Schmidt syndrome, Scleritis, Scleroderma, Sjogren's syndrome, Sperm & testicular autoimmunity, Stiff person syndrome, Subacute bacterial endocarditis (SBE), Susac's syndrome, Sympathetic ophthalmia, Takayasu's arteritis, Temporal arteritis/Giant cell arteritis, Thrombocytopenic purpura (TTP), Tolosa-Hunt syndrome, Transverse myelitis, Ulcerative colitis, Undifferentiated connective tissue disease (UCTD), Uveitis, Vasculitis, Vesiculobullous dermatosis, Vitiligo, and Wegener's granulomatosis (now termed Granulomatosis withPolyangiitis (GPA).

[0500] Various kidney diseases may be treated with pharmaceutical compositions, CA2 biocircuits, CA2 biocircuit components, CA2 effector modules including their SREs or payloads of the present disclosure

[0501] Various cardiovascular diseases may be treated with pharmaceutical compositions, CA2 biocircuits, CA2 biocircuit components, CA2 effector modules including their SREs or payloads of the present disclosure. As a non-limiting example, the cardiovascular disease may be Ischemic heart disease also known as coronary artery disease, Cerebrovascular disease (Stroke), Peripheral vascular disease, Heart failure, Rheumatic heart disease, and Congenital heart disease.

[0502] Various antibody deficiencies may be treated with pharmaceutical compositions, CA2 biocircuits, CA2 biocircuit components, CA2 effector modules including their SREs or payloads of the present disclosure. As a non-limiting example, the antibody deficiencies may be X-Linked Agammaglobulinemia (XLA), Autosomal Recessive Agammaglobulinemia (ARA), Common Variable Immune Deficiency (CVID), IgG (IgG1, IgG2, IgG3 and IgG4) Subclass Deficiency, Selective IgA Deficiency, Specific Antibody Deficiency (SAD), Transient Hypogammaglobulinemia of Infancy, Antibody Deficiency with Normal or Elevated Immunoglobulins, Selective IgM Deficiency, Immunodeficiency with Thymoma (Good's Syndrome), Transcobalamin II Deficiency, Warts, Hypogammaglobulinemia, Infection, Myelokathexis (WHIM) Syndrome, Drug-Induced Antibody Deficiency, Kappa Chain Deficiency, Heavy Chain Deficiencies, Post-Meiotic Segregation (PMS2) Disorder, and Unspecified Hypogammaglobulinemia.

[0503] Various ocular diseases may be treated with pharmaceutical compositions, CA2 biocircuits, CA2 biocircuit components, CA2 effector modules including their SREs or payloads of the present disclosure. As a non-limiting example, the ocular disease may be thyroid eye disease (TED), Graves' disease (GD) and orbitopathy, Retina Degeneration, Cataract, optic atrophy, macular degeneration, Leber congenital amaurosis, retinal degeneration, cone-rod dystrophy, Usher syndrome, leopard syndrome, photophobia, and photoaversion.

[0504] Various neurological diseases may be treated with pharmaceutical compositions, CA2 biocircuits, CA2 biocircuit components, CA2 effector modules including their SREs or payloads of the present disclosure.

[0505] Various psychological disorders may be treated with pharmaceutical compositions, CA2 biocircuits, CA2 biocircuit components, CA2 effector modules including their SREs or payloads of the present disclosure.

[0506] Various lung diseases may be treated with pharmaceutical compositions, CA2 biocircuits, CA2 biocircuit components, CA2 effector modules including their SREs or payloads of the present disclosure. As a non-limiting example, the lung diseases may be Asbestosis, Asthma, Bronchiectasis, Bronchitis, Chronic Cough, Chronic Obstructive Pulmonary Disease (COPD), Croup, Cystic Fibrosis, Hantavirus, Idiopathic Pulmonary Fibrosis, Pertussis, Pleurisy, Pneumonia, Pulmonary Embolism, Pulmonary Hypertension, Sarcoidosis, Sleep Apnea, Spirometry, Sudden Infant Death Syndrome (SIDS), Tuberculosis, Alagille Syndrome, Autoimmune Hepatitis, Biliary Atresia, Cirrhosis, ERCP (Endoscopic Retrograde Cholangiopancreatography), and Hemochromatosis. Nonalcoholic Steatohepatitis, Porphyria, Primary Biliary Cirrhosis, Primary Sclerosing Cholangitis.

[0507] Various bone diseases may be treated with pharmaceutical compositions, CA2 biocircuits, CA2 biocircuit components, CA2 effector modules including their SREs or payloads of the present disclosure. As a non-limiting example, the bone diseases may be osteoporosis, neurofibromatosis, osteogenesis imperfecta (0I), rickets, osteosarcoma, achondroplasia, fracture, osteomyelitis, Ewing tumor of bone, osteomalacia, hip dysplasia, Paget disease of bone, marble bone disease, osteochondroma, bone cancer, bone disease, osteochondrosis, osteoma, fibrous dysplasia, cleidocranial dysostosis, osteoclastoma, bone cyst, metabolic bone disease, melorheostosis, callus, Caffey syndrome, and mandibulofacial dysostosis.

[0508] Various blood diseases may be treated with pharmaceutical compositions, CA2 biocircuits, CA2 biocircuit components, CA2 effector modules including their SREs or payloads of the present disclosure. As a non-limiting example, the blood diseases may be Anemia and CKD (for health care professionals), Aplastic Anemia and Myelodysplastic Syndromes, Deep Vein Thrombosis, Hemochromatosis, Hemophilia, Henoch-Schonlein Purpura, Idiopathic Thrombocytopenic Purpura, Iron-Deficiency Anemia, Pernicious Anemia, Pulmonary Embolism, Sickle Cell Anemia, Sickle Cell Trait and Other Hemoglobinopathies, Thalassemia, Thrombotic Thrombocytopenic Purpura, and Von Willebrand Disease.

### Central Nervous System (CNS)

[0509] In some embodiments, pharmaceutical compositions, CA2 biocircuits, CA2 biocircuit components, CA2 effector modules including their SREs or payloads of the present disclosure may be used in the modulation or alteration or exploitation of proteins in the central nervous system including cerebrospinal (CSF) proteins.

[0510] In some examples, pharmaceutical compositions, CA2 biocircuits, CA2 biocircuit components, CA2 effector modules including their SREs or payloads of the present disclosure may be used to provide tunable ERT (enzyme replacement therapy) products to the central nervous system. Many lysosomal storage diseases (LSD) involve the CNS symptoms, such as mental retardation, seizures, profound neurodegeneration, behavioral abnormalities, and psycho-motor defects. ERT for LSDs is one of the true success stories in modern molecular medicine. The successful application of ERT relies on controlled lysosomal proteins (e.g., enzymes) and delivery to CNS cells.

### Metabolic Peptides and Hormones

[0511] In some embodiments, the CA2 biocircuits of the present disclosure and/or any of their components may be used to regulate peptides, natural or synthetic. Naturally occurring peptides may include but are not limited to, peptide hormones, natriuretic peptides, food peptides, and derivatives and precursors.

[0512] The CA2 biocircuits of the present disclosure and/or any of their components may also be utilized for pulsatile release of hormones or other peptide drugs.

### Patient Stratification

[0513] In one embodiment, patients may also be stratified according to the immunogenic peptides presented by their immune cells and may be utilized as a parameter to determine suitable patient cohorts that may therapeutically benefit for the compositions of the present disclosure.

### Transgenic Organisms

[0514] In some embodiments, the present disclosure provides transgenic organisms that expresses nucleic acids that encode polypeptides of the present disclosure. As used herein the term “transgenic organism” refers to any non-human entity that contains artificially transferred, exogenous genetic material. This approach provides the ability to temporally regulate payloads within defined cells, tissues or in the entire organism. Such methods may be useful in creating transgenic models for certain disease states, or for studying embryonic development.

[0515] Transgenic organisms described herein may include rodents, fish, reptiles, as well as invertebrates. In a preferred embodiment, such transgenic organisms may be selected from the rodent family including mouse, and rat. Tunable reaulations

[0516] The CA2 biocircuits of the present disclosure and/or any of their components may also be utilized to regulate the expression of another CA2 effector module such as a recombinant construct comprising a POI. In some embodiments, the CA2 biocircuits and/or CA2 effector modules may comprise a protease (also called peptidase or proteinase). The tunable protease could cleave an inactive construct to an active construct when the two components are co-introduced into a cell, a tissue or an organism.

[0517] In other examples, the CA2 biocircuits and/or CA2 effector modules comprising a protease may also be utilized to regulate protein processing including cleavage of the initial protein product to produce a smaller active protein or peptide.

[0518] In some embodiments, the CA2 biocircuits of the present disclosure and/or any of their components may comprise any of factors that play a role in protein processing and modification. Protein post-translational modification may include, but are not limited to, addition of hydrophobic groups by an enzyme (e.g., myristoylation, palmitoylation, isoprenylation, prenylation, farnesylation, geranylgeranylation, glypiation, and glycosylphosphatidylinositol (GPI) anchor); attachment of cofactors for enhanced function (e.g., lipoylation, flavin, phosphopantetheinylation, and heme C); addition of small chemical groups (e.g., acylation, formylation, alkylation, phosphorylation, methylation, arginylation, polyglutamylation, polyglycylation, butyrylation, glycosylation, propionylation, S-glutathionylation, S-nitrosylation, S-sulfenylation, succinylation, sulfation, and acetylation); linkage of other proteins and/or peptides such as ISGylation, SUMOylation, ubiquitination, neddylation, and pupylation; chemical modification of amino acids; and structural changes.

### Biofactories

[0519] The CA2 biocircuits of the present disclosure and/or any of their components may be utilized to regulate the levels of protein production in a biofactory. As used herein, the term “biofactory” refers to a cell, a tissue, an organ or an organism genetically modified or not, which can produce proteins with a number of applications including therapeutic purposes (inhibitors, enzymes, antibodies, antigens, etc.) or primary or secondary products of industrial interest. In some examples, the cell may be a prokaryotic cell, a eukaryotic cell, a mammalian cell, a plant cell, etc.

[0520] In some embodiments, the CA2 biocircuits of the present disclosure may be used to regulate medicament proteins produced in a target tissue, for example, the liver and the kidney. The liver is an organ that produces secreted proteins including major plasma proteins, factors in hemostasis and fibrinolysis, carrier proteins, hormones, prohormones and apolipoproteins, or a variety of short-lived metabolic peptides and enzymes which are usually tightly regulated, or other non-hepatic proteins. In the context, the liver fills a role of gene expression factory (biofactory), supplying a protein for treatment of a disease for example a metabolic disease.

[0521] In other embodiments, the CA2 biocircuits of the present disclosure may be used to regulate proteins for industrial processes.

### Liver Targeting

[0522] The liver is an important organ that produces proteins and involves blood clotting and a number of metabolic functions. A variety of diseases can affect liver and targeting the liver for disease treatment has been a promising approach, especially liver-targeted gene therapy. The CA2 biocircuits of the present disclosure and/or any of their components may be utilized to regulate liver targeted gene therapy and gene transfer.

[0523] Proteins that can be targeted to the liver and constructed to the present CA2 biocircuits for regulation may include those in liver cancers such as hepatocellular carcinoma (HCC), Fibrolamellar HCC, Cholangiocarcinoma, Angiosarcoma and secondary liver cancer; inherited disorders caused by defective genes such as hemochromatosis, Wilson disease, tyrosinemia, alpha 1 antitrypsin deficiency, glycogen storage disease; metabolic disorders due to enzyme deficiency such as Gilbert's syndrome, lysosomal acid lipase deficiency (LALD) and Gaucher disease; autoimmune hepatitis; fatty liver diseases; and viral hepatitis (A, B and C). In some examples, the present CA2 biocircuits may be used to direct IL12 for hepatocellular carcinoma (HCC), and IL10 for diabetic neuropathy.

### Microfluidics

[0524] In some embodiments, cells containing CA2 biocircuits of the present disclosure and/or any of their components may be utilized in microfluidics devices. As used herein a “microfluidics device” refers to the manipulation of picoliter to nanoliter-scale volumes of fluids within artificially fabricated microsystems. Microfluidic devices comprising CA2 biocircuits of the present disclosure may be utilized to study cell culture models, cellular microenvironment, cell secretions, chemotaxis, apoptosis, vascular function, neuron cell growth, embryonic development, single cell metabolomics, gene expression, drug research, cellular separation, stem cell biology, bioreactors, three-dimensional cell culture, and tissue engineering.

### Tools and Agents for Making Therapeutics

[0525] Provided in the present disclosure are tools and agents that may be used in generating therapeutics such as, but not limited to, immunotherapeutics for reducing a tumor volume or burden in a subject in need. A considerable number of variables are involved in producing a therapeutic agent, such as structure of the payload, type of cells, method of gene transfers, method and time of ex vivo expansion, pre-conditioning and the amount and type of tumor burden in the subject. Such parameters may be optimized using tools and agents described herein.

### Cell Lines

[0526] The present disclosure provides a mammalian cell that has been genetically modified with the compositions of the present disclosure. Suitable mammalian cells include primary cells and immortalized cell lines. Suitable mammalian cell lines include, but are not limited to Human embryonic kidney cell line 293, fibroblast cell line NIH 3T3, human colorectal carcinoma cell line HCT116, ovarian carcinoma cell line SKOV-3, immortalized T cell lines (e.g. Jurkat cells and SupT1 cells), lymphoma cell line Raji cells, NALM-6 cells, K562 cells, HeLa cells, PC12 cells, HL-60 cells, NK cell lines (e.g. NKL, NK92, NK962, and YTS), and the like. In some instances, the cell is not an immortalized cell line, but instead a cell obtained from an individual and is herein referred to as a primary cell. For example, the cell is a T lymphocyte obtained from an individual. Other examples include, but are not limited to cytotoxic cells, stem cells, peripheral blood mononuclear cells or progenitor cells obtained from an individual.

### Tracking SREs, Biocircuits and Cell Lines

[0527] In some embodiments, it may be desirable to track the compositions of the present disclosure or the cells modified by the compositions described herein. Tracking may be achieved by using payloads such as reporter moieties, which, as used herein, refers to any protein capable of creating a detectable signal, in response to an input. Examples include alkaline phosphatase, β-galactosidase, chloramphenicol acetyltransferase, β-glucuronidase, peroxidase, β-lactamase, catalytic antibodies, bioluminescent proteins e.g. luciferase, and fluorescent proteins such as Green fluorescent protein (GFP).

[0528] Reporter moieties may be used to monitor the response of the SREs upon addition of the ligand corresponding to the SRE. In other instances, reporter moieties may be used to track cell survival, persistence, cell growth, and/or localization in vitro, in vivo, or ex vivo.

[0529] In some embodiments, the preferred reporter moiety may be luciferase proteins.

### Chaperones

[0530] In some embodiments, CA2 effector modules of the present disclosure may include one or more chaperones to regulate the expression of the payload. Chaperones useful in the present disclosure may be cellular chaperones or small molecules referred to as pharmacological chaperones. Cellular chaperones refer to a large group of unrelated protein families whose role is to stabilize unfolded client proteins, or to unfold client proteins for translocation across membranes or for degradation, and/or to assist in their correct folding and assembly. Chaperones also cooperate with other components of the proteostasis network such as the proteasome system and autophagy to promote protein clearance. Examples of molecular chaperone families include small heat shock proteins such as hsp25; Heat shock protein 60 family proteins such as cpn60 and GroEL; Heat shock protein 70 family proteins such as DnaK and BiP; Heat shock protein 90 family proteins; Heat shock protein 100 family proteins such as CIp; lectin chaperones such as calnexin and calreticulin; and folding chaperones such as Protein disulfide isomerases (PDI), peptidyl prolyl ci-trans isomerase (PPI) and ERp57. In some embodiments, the payload of the present disclosure may be a cellular chaperone. In the absence of a stimulus which stabilizes the SRE, the cellular chaperone may bind to the SRE and is therefore unavailable to interact with its client proteins. In the presence of the stimulus specific to the SRE, the SRE is stabilized and the chaperone is available to interact with client proteins. In some embodiments, payloads of the present disclosure may be appended to chaperones such that the stability or instability of the payload may be enhanced. In other embodiments, the SREs of the present disclosure may consist of one or more molecular chaperones.

[0531] Chaperones useful in the present disclosure may also include pharmacological chaperones which utilizes small molecules to facilitate the correct folding and stabilization of cellular proteins. Mutations in cellular proteins can result in protein misfolding and/or aggregation which ultimately results in their degradation. Pharmacological chaperones have been designed to bind to misfolded target proteins, facilitate their correct folding and thereby prevent their degradation. In some embodiments, SREs of the present disclosure may comprise one or more misfolded proteins and the stimulus specific to the SRE may include one or pharmacological chaperones such that the CA2 effector module is stabilized only in the presence of the pharmacological chaperone.

### Animal Models

[0532] The utility and efficacy of the compositions of the present disclosure may be tested in in vivo animal models, preferably mouse models. Mouse models used may be syngeneic mouse models wherein mouse cells are modified with compositions of the present disclosure and tested in mice of the same genetic background. Examples include pMEL-1 and 4T1 mouse models. Alternatively, xenograft models where human cells such as tumor cells and immune cells are introduced into immunodeficient mice may also be utilized in such studies. Immunodeficient mice used may be CByJ.Cg-Foxnlnu/J, B6; 129S7-Rag1tm1Mom/J, B6.129S7-Rag1tm1Mom/J, B6. CB17-Prkdcscid/SzJ, NOD.129S7(B6)-Rag1tm1Mom/J, NOD.Cg-Rag1tm1MomPrf1tm1Sdz/Sz, NOD.CB17-Prkdcscid/SzJ, NOD.Cg-PrkdcscidB2mtm1Unc/J, NOD-scid IL2Rgnull, Nude (nu) mice, SCID mice, NOD mice, RAG1/RAG2 mice, NOD-Scid mice, IL2rgnull mice, b2mnull mice, NOD-scid IL2r□null mice, NOD-scid-B2mnull mice, beige mouse, and HLA transgemc mice.

### Cellular Assays

[0533] In some embodiments, the effectiveness of the compositions of the disclosure as immunotherapeutic agents may be evaluated using cellular assays. Levels of expression and/or identity of the compositions described herein may be determined according to any methods known in the art for identifying proteins and/or quantitating proteins levels. In some embodiments, such methods may include Western Blotting, flow cytometry, and immunoassays.

[0534] Provided herein are methods for functionally characterizing cells expressing SRE, CA2 biocircuits and compositions of the invention. In some embodiments, functional characterization is carried out in primary immune cells or immortalized immune cell lines and may be determined by expression of cell surface markers. Examples of cell surface markers for T cells include, but are not limited to, CD3, CD4, CD8, CD 14, CD20, CD11b, CD16, CD45 and HLA-DR, CD 69, CD28, CD44, IFNgamma. Markers for T cell exhaustion include PD1, TIM3, BTLA, CD160, 2B4, CD39, and LAG3. Examples of cell surface markers for antigen presenting cells include, but are not limited to, MHC class I, MHC Class II, CD40, CD45, B7-1, B7-2, IFN γ receptor and IL2 receptor, ICAM-1 and/or Fey receptor. Examples of cell surface markers for dendritic cells include, but are not limited to, MHC class I, MHC Class II, B7-2, CD18, CD29, CD31, CD43, CD44, CD45, CD54, CD58, CD83, CD86, CMRF-44, CMRF-56, DCIR and/or Dectin-1 and the like; while in some cases also having the absence of CD2, CD3, CD4, CD8, CD14, CD15, CD16, CD 19, CD20, CD56, and/or CD57. Examples of cell surface markers for NK cells include, but are not limited to, CCL3, CCL4, CCL5, CCR4, CXCR4, CXCR3, NKG2D, CD71, CD69, CCR5, Phospho JAK/STAT, phospho ERK, phospho p38/MAPK, phospho AKT, phospho STAT3, Granulysin, Granzyme B, Granzyme K, IL10, IL22, IFNg, LAP, Perforin, and TNFa.

### T Cell Exhaustion

[0535] In some embodiments, CA2 biocircuits, SREs or CA2 effector modules may be utilized to prevent T cell exhaustion. As used herein, “T cell exhaustion” refers to the stepwise and progressive loss of T cell function caused by chronic T cell activation. T cell exhaustion is a major factor limiting the efficacy of antiviral and antitumor immunotherapies. Exhausted T cells have low proliferative and cytokine producing capabilities concurrent with high rates of apoptosis and high surface expression of multiple inhibitory receptors. T cell activation leading to exhaustion may occur either in the presence or absence of the antigen.

### Cells

[0536] In accordance with the present disclosure, cells genetically modified to express at least one CA2 biocircuit, SRE (e.g., CA2 DD), CA2 effector module and immunotherapeutic agent of the present disclosure, are provided. Cells of the present disclosure may include, without limitation, immune cells, stem cells and tumor cells. In some embodiments, immune cells are effector immune cells, including, but not limiting to, T cells such as CD8+ T cells and CD4+ T cells (e.g., Th1, Th2, Th17, Foxp3+ cells), memory T cells such as T memory stem cells, central T memory cells, and effector memory T cells, terminally differentiated effector T cells, natural killer (NK) cells, NK T cells, tumor infiltrating lymphocytes (TILs), cytotoxic T lymphocytes (CTLs), regulatory T cells (Tregs), and dendritic cells (DCs), other immune cells that can elicit an effector function, or the mixture thereof. T cells may be Tao cells and Ty6 cells. In some embodiments, stem cells may be from human embryonic stem cells, mesenchymal stem cells, and neural stem cells. In some embodiments, T cells may be depleted endogenous T cell receptors (See U.S. Pat. Nos. 9,273,283; 9,181,527; and 9,028,812; the contents of each of which are incorporated herein by reference in their entirety).

[0537] In some embodiments, cells of the present disclosure may be autologous, allogeneic, syngeneic, or xenogeneic in relation to a particular individual subject.

[0538] In some embodiments, cells of the present disclosure may be mammalian cells, particularly human cells. Cells described herein may be primary cells or immortalized cell lines.

[0539] In some embodiments, cells of the present disclosure may include expansion factors as payload to trigger proliferation and expansion of the cells. Exemplary payloads include members of the RAS superfamily.

[0540] Engineered immune cells can be accomplished by transducing a cell composition with a polypeptide of a CA2 biocircuit, a CA2 effector module, a SRE and/or a payload of interest (e.g., immunotherapeutic agent), or a polynucleotide encoding said polypeptide, or a vector comprising said polynucleotide. The vector may be a viral vector such as a lentiviral vector, a gamma-retroviral vector, a recombinant AAV, an adenoviral vector and an oncolytic viral vector. In other aspects, non-viral vectors for example, nanoparticles and liposomes may also be used. In some embodiments, immune cells of the present disclosure are genetically modified to express at least one immunotherapeutic agent described herein which is tunable using a stimulus. In some examples, two, three or more immunotherapeutic agents constructed in the same CA2 biocircuit and CA2 effector module are introduced into a cell. In other examples, two, three, or more biocircuits, effector modules, each of which comprises an immunotherapeutic agent, may be introduced into a cell.

[0541] In some embodiments, immune cells of the present disclosure may be T cells modified to express an antigen-specific T cell receptor (TCR), or an antigen specific chimeric antigen receptor (CAR) taught herein (known as CAR T cells). Accordingly, at least one polynucleotide encoding a CAR system (or a TCR) described herein, or a vector comprising the polynucleotide is introduced into a T cell. The T cell expressing the CAR or TCR binds to a specific antigen via the extracellular targeting moiety of the CAR or TCR, thereby a signal via the intracellular signaling domain (s) is transmitted into the T cell, and as a result, the T cell is activated. The activated CAR T cell changes its behavior including release of a cytotoxic cytokine (e.g., a tumor necrosis factor, and lymphotoxin, etc.), improvement of a cell proliferation rate, change in a cell surface molecule, or the like. Such changes cause destruction of a target cell expressing the antigen recognized by the CAR or TCR. In addition, release of a cytokine or change in a cell surface molecule stimulates other immune cells, for example, a B cell, a dendritic cell, a NK cell, and a macrophage.

[0542] In some embodiments, CAR T cells of the present disclosure may be further modified to express another one, two, three or more immunotherapeutic agents. The immunotherapeutic agents may be another CAR or TCR specific to a different target molecule; a cytokine such as IL2, IL12, IL15 and IL18, or a cytokine receptor such as IL15Ra; a chimeric switch receptor that converts an inhibitory signal to a stimulatory signal; a homing receptor that guides adoptively transferred cells to a target site such as the tumor tissue; an agent that optimizes the metabolism of the immune cell; or a safety switch gene (e.g., a suicide gene) that kills activated T cells when a severe event is observed after adoptive cell transfer or when the transferred immune cells are no-longer needed. These molecules may be included in the same effector module or in separate effector modules.

[0543] In related embodiments of the above, an engineered cell, for example, an immune cell as described herein can be genetically manipulated to express one or more immunotherapeutic agents, wherein one or more of the immunotherapeutic agents are regulated using the effector modules described herein. In an exemplary embodiment, an engineered cell comprises: i) a first polynucleotide which encodes a first polypeptide, said first polypeptide comprising: a. a first stimulus response element (SRE), wherein the first SRE comprises a drug responsive domain (DRD), said DRD comprising a human carbonic anhydrase 2 (CA2; SEQ ID NO. 5810) or a region thereof, and further comprising one or more mutations relative to the amino acid sequence of SEQ ID NO. 5810; and b. a first payload which is operably linked to the first SRE, wherein (I) the first payload comprises CD40L (SEQ ID NO. 6) or a portion thereof; or (II) the first payload comprises CD40L (SEQ ID NO. 6) or a portion thereof comprising one or more mutations relative to the amino acid sequence of SEQ ID NO. 6; and ii) a second polynucleotide which encodes one or more additional polypeptides, said one or more additional polypeptides comprising an immunotherapeutic agent selected from the group consisting of: a T cell receptor (TCR) and variants thereof or a chimeric antigen receptor (CAR); wherein at least one mutation of the one or more mutations in the DRD of the first SRE destabilizes the DRD and the first payload in the absence of a first stimulus and wherein the DRD and the first payload are stabilized in the presence of the first stimulus, and the second polypeptide is expressed independently of the first payload.

[0544] In various embodiments, the payloads of the engineered cells can include: i) CD40L (SEQ ID NO. 6) or a portion thereof comprising at least one mutation; or ii) CD40L (SEQ ID NO. 6) or a portion thereof comprising at least two mutations, optionally, wherein the at least two mutations are selected from: (i) H224G and G226F; (ii) H224G and G226H; (iii) Y172G and G226F; (iv) H125 and G227; (v) Y120G, H224G and G226W; and vi) S110G, F111G, E112S, M113G, Q114G, and K115S. Illustrative engineered cells as provided above having a second immunotherapeutic agent, along with a regulated first immunoitherapeutic agent, for example, CD40L, the one or more additinoal polypeptides comprisnig the second immunotherapeutic agent may be linked to a second SRE comprising a second DRD, and in some examples, the second DRD is the same or different as the DRD in the first SRE linked to the first payload, and the second DRD and the second polypeptide are both destabilized in the absence of the first or a second stimulus and wherein the second DRD and the second polypeptide are stabilized in the presence of the first or the second stimulus. In some embodiments, the engineered cell comprises a first payload e.g., CD40L operably linked to a first DRD and a second immunotherapeutic agent, for example, a CAR or TCR is introduced into the engineered cell such that the second immunotherapeutic agent, for example, a CAR or TCR is expressed independently from the first payload, and the polynucleotide encoding the second immunotherapeutic agent may be stably integrated into the engineered cell's genome such that the second immunotherapeutic agent is constitutively expressed or expressed in an inducible manner using an inducible promoter in the engineered cell. In various embodiments, the engineered cell is selected from a CD8+ T cell, a CD4+ T cell, a helper T cell, a natural killer (NK) cell, a NKT cell, a cytotoxic T lymphocyte (CTL), a tumor infiltrating lymphocyte (TIL), a memory T cell, a regulatory T (Treg) cell, a cytokine-induced killer (CIK) cell, a dendritic cell, lymphokine activated killer (LAK) cells, a human embryonic stem cell, a mesenchymal stem cell, a hematopoietic stem cell, or a mixture thereof.

[0545] In one embodiment, the CAR T cell (including TCR T cell) of the present disclosure may be an “armed” CAR T cell which is transformed with a CA2 effector module comprising a CAR and a CA2 effector module comprising a cytokine. The inducible or constitutively secreted active cytokines further armor CAR T cells to improve efficacy and persistence. In this context, such CAR T cell is also referred to as “armored CAR T cell”. The “armor” molecule may be selected based on the tumor microenvironment and other elements of the innate and adaptive immune systems. In some embodiments, the molecule may be a stimulatory factor such as IL2, IL12, IL15, IL18, type I IFN, CD40L and 4-1BBL which have been shown to further enhance CAR T cell efficacy and persistence in the face of a hostile tumor microenvironment via different mechanisms (Yeku et al., Biochem Soc Trans., 2016, 44(2): 412-418).

[0546] In some embodiments, immune cells of the present disclosure may be NK cells modified to express an antigen-specific T cell receptor (TCR), or an antigen specific chimeric antigen receptor (CAR) taught herein.

[0547] NK cells may be isolated from peripheral blood mononuclear cells (PBMCs) or derived from human embryonic stem (ES) cells and induced pluripotent stem cells (iPSCs). The primary NK cells isolated from PBMCs may be further expanded for adoptive immunotherapy. Strategies and protocols useful for the expansion of NK cells may include interleukin 2 (IL2) stimulation and the use of autologous feeder cells, or the use of genetically modified allogeneic feeder cells. In some aspects, NK cells can be selectively expanded with a combination of stimulating ligands including IL15, IL21, IL2, 41BBL, IL12, IL18, MICA, 2B4, LFA-1, and BCM1/SLAMF2 (e.g., US patent publication NO. US20150190471).

[0548] Immune cells expressing CA2 effector modules comprising a CAR and/or other immunotherapeutic agents can be used as cancer immunotherapy. The immunotherapy comprises the cells expressing a CAR and/or other immunotherapeutic agents as an active ingredient and may further comprise a suitable excipient. Examples of the excipient may include the aforementioned pharmaceutically acceptable excipients, including various cell culture media, and isotonic sodium chloride.

[0549] In some embodiments, cells of the present disclosure may be dendritic cells that are genetically modified to express the compositions of the present disclosure. Such cells may be used as cancer vaccines.

### V. Definitions

[0550] At various places in the present specification, features or functions of the compositions of the present disclosure are disclosed in groups or in ranges. It is specifically intended that the present disclosure include each and every individual sub combination of the members of such groups and ranges. The following is a non-limiting list of term definitions.

[0551] Activity: As used herein, the term “activity” refers to the condition in which things are happening or being done. Compositions described herein may have activity and this activity may involve one or more biological events. In some embodiments, biological events may include cell signaling events. In some embodiments, biological events may include cell signaling events associated protein interactions with one or more corresponding proteins, receptors, small molecules or any of the biocircuit components described herein.

[0552] Adoptive cell therapy (ACT): The terms “Adoptive cell therapy” or “Adoptive cell transfer”, as used herein, refer to a cell therapy involving in the transfer of cells into a patient, wherein cells may have originated from the patient, or from another individual, and are engineered (altered) before being transferred back into the patient. The therapeutic cells may be derived from the immune system, such as effector immune cells: CD4+ T cell; CD8+ T cell, Natural Killer cell (NK cell); and B cells and tumor infiltrating lymphocytes (TILs) derived from the resected tumors. Most commonly transferred cells are autologous anti-tumor T cells after ex vivo expansion or manipulation. For example, autologous peripheral blood lymphocytes can be genetically engineered to recognize specific tumor antigens by expressing T-cell receptors (TCR) or chimeric antigen receptor (CAR).

[0553] Agent: As used herein, the term “agent” refers to a biological, pharmaceutical, or chemical compound. Non-limiting examples include simple or complex organic or inorganic molecule, a peptide, a protein, an oligonucleotide, an antibody, an antibody derivative, antibody fragment, a receptor, and soluble factor.

[0554] Agonist: the term “agonist” as used herein, refers to a compound that, in combination with a receptor, can produce a cellular response. An agonist may be a ligand that directly binds to the receptor. Alternatively, an agonist may combine with a receptor indirectly by, for example, (a) forming a complex with another molecule that directly binds to the receptor, or (b) otherwise resulting in the modification of another compound so that the other compound directly binds to the receptor. An agonist may be referred to as an agonist of a particular receptor or family of receptors, e.g., agonist of a co-stimulatory receptor.

[0555] Antagonist: the term “antagonist” as used herein refers to any agent that inhibits or reduces the biological activity of the target(s) it binds.

[0556] Antigen: the term “antigen” as used herein is defined as a molecule that provokes an immune response when it is introduced into a subject or produced by a subject such as tumor antigens which arise by the cancer development itself. This immune response may involve either antibody production, or the activation of specific immunologically-competent cells such as cytotoxic T lymphocytes and T helper cells, or both. An antigen can be derived from organisms, subunits of proteins/antigens, killed or inactivated whole cells or lysates. In the context of the present disclosure, the terms “antigens of interest” or “desired antigens” refers to those proteins and/or other biomolecules provided herein that are immunospecifically bound or interact with antibodies of the present disclosure and/or fragments, mutants, variants, and/or alterations thereof described herein. In some embodiments, antigens of interest may comprise any of the polypeptides or payloads or proteins described herein, or fragments or portions thereof.

[0557] Approximately: As used herein, the term “approximately” or “about,” as applied to one or more values of interest, refers to a value that is similar to a stated reference value. In certain embodiments, the term “approximately” or “about” refers to a range of values that fall within 25, 20, 19, 18, 17, 16, 15, 14, 13, 12, 11, 10, 9, 8, 7, 6, 5, 4, 3, 2, 1, or less in either direction (greater than or less than) of the stated reference value unless otherwise stated or otherwise evident from the context (except where such number would exceed 100 of a possible value).

[0558] Associated with: As used herein, the terms “associated with,” “conjugated,” “linked,” “attached,” and “tethered,” when used with respect to two or more moieties, mean that the moieties are physically associated or connected with one another, either directly or via one or more additional moieties that serve as linking agents, to form a structure that is sufficiently stable so that the moieties remain physically associated under the conditions in which the structure is used, e.g., physiological conditions. An “association” need not be strictly through direct covalent chemical bonding. It may also suggest ionic or hydrogen bonding or a hybridization-based connectivity sufficiently stable such that the “associated” entities remain physically associated.

[0559] Autologous: the term “autologous” as used herein is meant to refer to any material derived from the same individual to which it is later to be re-introduced into the individual.

[0560] Barcode: the term “barcode” as used herein refers to polynucleotide or amino acid sequence that distinguishes one polynucleotide or amino acid from another.

[0561] Cancer: the term “cancer” as used herein refers a broad group of various diseases characterized by the uncontrolled growth of abnormal cells in the body. Unregulated cell division and growth results in the formation of malignant tumors that invade neighboring tissues ultimately metastasize to distant parts of the body through the lymphatic system or bloodstream.

[0562] Co-stimulatory molecule: As used herein, in accordance with its meaning in immune T cell activation, refers to a group of immune cell surface receptor/ligands which engage between T cells and APCs and generate a stimulatory signal in T cells which combines with the stimulatory signal in T cells that results from T cell receptor (TCR) recognition of antigen/MHC complex (pMHC) on APCs

[0563] Cytokines: the term “cytokines”, as used herein, refers to a family of small soluble factors with pleiotropic functions that are produced by many cell types that can influence and regulate the function of the immune system.

[0564] Delivery: the term “delivery” as used herein refers to the act or manner of delivering a compound, substance, entity, moiety, cargo or payload. A “delivery agent” refers to any agent which facilitates, at least in part, the in vivo delivery of one or more substances (including, but not limited to a compound and/or composition of the present disclosure) to a cell, subject or other biological system cells.

[0565] Destabilized: As used herein, the term “destable,” “destabilize,” “destabilizing region” or “destabilizing domain” means a region or molecule that is less stable than a starting, reference, wild-type or native form of the same region or molecule.

[0566] Destabilizing domain (DD): As used herein, the term “destabilizing domain” refers to a protein or region or domain thereof that can be operably linked to a payload of interest (POI). In the absence of a DD-binding ligand, the DD renders the operably linked POI unstable, such that the POI is rapidly degraded within the cell. In the presence of a DD-binding ligand, the operably linked POI is stabilized, and protein function restored. As used herein, the terms “destabilizing domain” and “drug responsive domain” (DRD) are interchangeable.

[0567] Engineered: As used herein, embodiments of the present disclosure are “engineered” when they are designed to have a feature or property, whether structural or chemical, that varies from a starting point, wild type or native molecule.

[0568] Expression: As used herein, “expression” of a nucleic acid sequence refers to one or more of the following events: (1) production of an RNA template from a DNA sequence (e.g., by transcription); (2) processing of an RNA transcript (e.g., by splicing, editing, 5′ cap formation, and/or 3′ end processing); (3) translation of an RNA into a polypeptide or protein; (4) folding of a polypeptide or protein; and (5) post-translational modification of a polypeptide or protein.

[0569] Feature: As used herein, a “feature” refers to a characteristic, a property, or a distinctive element.

[0570] Formulation: As used herein, a “formulation” includes at least a compound and/or composition of the present disclosure and a delivery agent.

[0571] Fragment: A “fragment,” as used herein, refers to a portion. For example, fragments of proteins may comprise polypeptides obtained by digesting full-length protein. In some embodiments, a fragment of a protein includes at least 3, 4, 5, 6, 7, 8, 9, 10, 11, 12, 13, 14, 15, 16, 17, 18, 19, 20, 25, 30, 35, 40, 45, 50, 55, 60, 65, 70, 75, 80, 85, 90, 95, 100, 150, 200, 250 or more amino acids. In some embodiments, fragments of an antibody include portions of an antibody.

[0572] Functional: As used herein, a “functional” biological molecule is a biological entity with a structure and in a form in which it exhibits a property and/or activity by which it is characterized.

[0573] Immune cells: the term “an immune cell”, as used herein, refers to any cell of the immune system that originates from a hematopoietic stem cell in the bone marrow, which gives rise to two major lineages, a myeloid progenitor cell (which give rise to myeloid cells such as monocytes, macrophages, dendritic cells, megakaryocytes and granulocytes) and a lymphoid progenitor cell (which give rise to lymphoid cells such as T cells, B cells and natural killer (NK) cells). Exemplary immune system cells include a CD4+ T cell, a CD8+ T cell, a CD4− CD8− double negative T cell, a T 7 cell, a Tuo cell, a regulatory T cell, a natural killer cell, and a dendritic cell. Macrophages and dendritic cells may be referred to as “antigen presenting cells” or “APCs,” which are specialized cells that can activate T cells when a major histocompatibility complex (MHC) receptor on the surface of the APC complexed with a peptide interacts with a TCR on the surface of a T cell.

[0574] Immunotherapy: the term “immunotherapy” as used herein, refers to a type of treatment of a disease by the induction or restoration of the reactivity of the immune system towards the disease.

[0575] Immunotherapeutic agent: The term “immunotherapeutic agent” as used herein, refers to abiological, pharmaceutical, or chemical compound capable of being used for the treatment of disease by the induction or restoration of the reactivity of the immune system towards the disease.

[0576] In vitro: As used herein, the term “in vitro” refers to events that occur in an artificial environment, e.g., in a test tube or reaction vessel, in cell culture, in a Petri dish, etc., rather than within an organism (e.g., animal, plant, or microbe).

[0577] In vivo: As used herein, the term “in vivo” refers to events that occur within an organism (e.g., animal, plant, or microbe or cell or tissue thereof).

[0578] Linker: As used herein, a linker refers to a moiety that connects two or more domains, moieties or entities. In one embodiment, a linker may comprise 10 or more atoms. In a further embodiment, a linker may comprise a group of atoms, e.g., 10-1,000 atoms, and can be comprised of the atoms or groups such as, but not limited to, carbon, amino, alkylamino, oxygen, sulfur, sulfoxide, sulfonyl, carbonyl, and imine. In some embodiments, a linker may comprise one or more nucleic acids comprising one or more nucleotides. In some embodiments, the linker may comprise an amino acid, peptide, polypeptide or protein. In some embodiments, a moiety bound by a linker may include, but is not limited to an atom, a chemical group, a nucleoside, a nucleotide, a nucleobase, a sugar, a nucleic acid, an amino acid, a peptide, a polypeptide, a protein, a protein complex, a payload (e.g., a therapeutic agent). or a marker (including, but not limited to a chemical, fluorescent, radioactive or bioluminescent marker). The linker can be used for any useful purpose, such as to form multimers or conjugates, as well as to administer a payload, as described herein. Examples of chemical groups that can be incorporated into the linker include, but are not limited to, alkyl, alkenyl, alkynyl, amido, amino, ether, thioether, ester, alkylene, heteroalkylene, aryl, or heterocyclyl, each of which can be optionally substituted, as described herein. Examples of linkers include, but are not limited to, unsaturated alkanes, polyethylene glycols (e.g., ethylene or propylene glycol monomeric units, e.g., diethylene glycol, dipropylene glycol, triethylene glycol, tripropylene glycol, tetraethylene glycol, or tetraethylene glycol), and dextran polymers, Other examples include, but are not limited to, cleavable moieties within the linker, such as, for example, a disulfide bond (—S—S—) or an azo bond (—N═N—), which can be cleaved using a reducing agent or photolysis. Non-limiting examples of a selectively cleavable bonds include an amido bond which may be cleaved for example by the use of tris(2-carboxyethyl) phosphine (TCEP), or other reducing agents, and/or photolysis, as well as an ester bond which may be cleaved for example by acidic or basic hydrolysis.

[0579] Checkpoint/factor: As used herein, a checkpoint factor is any moiety or molecule whose function acts at the junction of a process. For example, a checkpoint protein, ligand or receptor may function to stall or accelerate the cell cycle.

[0580] Metabolite: Metabolites are the intermediate products of metabolic reactions catalyzed by enzymes that naturally occur within cells. This term is usually used to describe small molecules, fragments of larger biomolecules or processed products.

[0581] Modified: As used herein, the term “modified” refers to a changed state or structure of a molecule or entity as compared with a parent or reference molecule or entity. Molecules may be modified in many ways including chemically, structurally, and functionally. In some embodiments, compounds and/or compositions of the present disclosure are modified by the introduction of non-natural amino acids.

[0582] Mutation: As used herein, the term “mutation” refers to a change and/or alteration. In some embodiments, mutations may be changes and/or alterations to proteins (including peptides and polypeptides) and/or nucleic acids (including polynucleic acids). In some embodiments, mutations comprise changes and/or alterations to a protein and/or nucleic acid sequence. Such changes and/or alterations may comprise the addition, substitution and or deletion of one or more amino acids (in the case of proteins and/or peptides) and/or nucleotides (in the case of nucleic acids and or polynucleic acids e.g., polynucleotides). In some embodiments, wherein mutations comprise the addition and/or substitution of amino acids and/or nucleotides, such additions and/or substitutions may comprise 1 or more amino acid and/or nucleotide residues and may include modified amino acids and/or nucleotides. The resulting construct, molecule or sequence of a mutation, change or alteration may be referred to herein as a mutant.

[0583] Neoantigen: the term “neoantigen”, as used herein, refers to a tumor antigen that is present in tumor cells but not normal cells and do not induce deletion of their cognate antigen specific T cells in thymus (i.e., central tolerance). These tumor neoantigens may provide a “foreign” signal, similar to pathogens, to induce an effective immune response needed for cancer immunotherapy. A neoantigen may be restricted to a specific tumor. A neoantigen be a peptide/protein with a missense mutation (missense neoantigen), or a new peptide with long, completely novel stretches of amino acids from novel open reading frames (neoORFs). The neoORFs can be generated in some tumors by out-of-frame insertions or deletions (due to defects in DNA mismatch repair causing microsatellite instability), gene-fusion, read-through mutations in stop codons, or translation of improperly spliced RNA (e.g., Saeterdal et al., Proc Natl Acad Sci USA, 2001, 98: 13255-13260).

[0584] Off-target: As used herein, “off target” refers to any unintended effect on any one or more target, gene, cellular transcript, cell, and/or tissue.

[0585] Operably linked: As used herein, the phrase “operably linked” refers to a functional connection between two or more molecules, constructs, transcripts, entities, moieties or the like.

[0586] Payload or payload of interest (POI): The terms “payload” and “payload of interest (POI)”, as used herein, are used interchangeable. A payload of interest (POI) refers to any polypeptide or protein that is operably linked to a destabilizing domain (DD). In the context of the present disclosure, the POI is a component in the immune system, including both innate and adaptive immune systems. A payload of interest may be referred to as a protein of interest.

[0587] Pharmaceutically acceptable excipients: the term “pharmaceutically acceptable excipient,” as used herein, refers to any ingredient other than active agents (e.g., as described herein) present in pharmaceutical compositions and having the properties of being substantially nontoxic and non-inflammatory in subjects. In some embodiments, pharmaceutically acceptable excipients are vehicles capable of suspending and/or dissolving active agents. Excipients may include, for example: antiadherents, antioxidants, binders, coatings, compression aids, disintegrants, dyes (colors), emollients, emulsifiers, fillers (diluents), film formers or coatings, flavors, fragrances, glidants (flow enhancers), lubricants, preservatives, printing inks, sorbents, suspending or dispersing agents, sweeteners, and waters of hydration. Exemplary excipients include, but are not limited to: butylated hydroxytoluene (BHT), calcium carbonate, calcium phosphate (dibasic), calcium stearate, croscarmellose, crosslinked polyvinyl pyrrolidone, citric acid, crospovidone, cysteine, ethylcellulose, gelatin, hydroxypropyl cellulose, hydroxypropyl methylcellulose, lactose, magnesium stearate, maltitol, mannitol, methionine, methylcellulose, methyl paraben, microcrystalline cellulose, polyethylene glycol, polyvinyl pyrrolidone, povidone, pregelatinized starch, propyl paraben, retinyl palmitate, shellac, silicon dioxide, sodium carboxymethyl cellulose, sodium citrate, sodium starch glycolate, sorbitol, starch (corn), stearic acid, sucrose, talc, titanium dioxide, vitamin A, vitamin E, vitamin C, and xylitol.

[0588] Pharmaceutically acceptable salts: Pharmaceutically acceptable salts of the compounds described herein are forms of the disclosed compounds wherein the acid or base moiety is in its salt form (e.g., as generated by reacting a free base group with a suitable organic acid). Examples of pharmaceutically acceptable salts include, but are not limited to, mineral or organic acid salts of basic residues such as amines; alkali or organic salts of acidic residues such as carboxylic acids; and the like. Representative acid addition salts include acetate, adipate, alginate, ascorbate, aspartate, benzenesulfonate, benzoate, bisulfate, borate, butyrate, camphorate, camphorsulfonate, citrate, cyclopentanepropionate, digluconate, dodecylsulfate, ethanesulfonate, fumarate, glucoheptonate, glycerophosphate, hemisulfate, heptonate, hexanoate, hydrobromide, hydrochloride, hydroiodide, 2-hydroxy-ethanesulfonate, lactobionate, lactate, laurate, lauryl sulfate, malate, maleate, malonate, methanesulfonate, 2-naphthalenesulfonate, nicotinate, nitrate, oleate, oxalate, palmitate, pamoate, pectinate, persulfate, 3-phenylpropionate, phosphate, picrate, pivalate, propionate, stearate, succinate, sulfate, tartrate, thiocyanate, toluenesulfonate, undecanoate, valerate salts, and the like. Representative alkali or alkaline earth metal salts include sodium, lithium, potassium, calcium, magnesium, and the like, as well as nontoxic ammonium, quaternary ammonium, and amine cations, including, but not limited to ammonium, tetramethylammonium, tetraethylammonium, methylamine, dimethylamine, trimethylamine, triethylamine, ethylamine, and the like. Pharmaceutically acceptable salts include the conventional non-toxic salts, for example, from non-toxic inorganic or organic acids. In some embodiments, a pharmaceutically acceptable salt is prepared from a parent compound which contains a basic or acidic moiety by conventional chemical methods. Generally, such salts can be prepared by reacting the free acid or base forms of these compounds with a stoichiometric amount of the appropriate base or acid in water or in an organic solvent, or in a mixture of the two; generally, nonaqueous media like ether, ethyl acetate, ethanol, isopropanol, or acetonitrile are preferred. Lists of suitable salts are found in Remington's Pharmaceutical Sciences, 17th ed., Mack Publishing Company, Easton, Pa., 1985, p. 1418, Pharmaceutical Salts: Properties, Selection, and Use, P. H. Stahl and C. G. Wermuth (eds.), Wiley-VCH, 2008, and Berge et al., Journal of Pharmaceutical Science, 66, 1-19 (1977), each of which is incorporated herein by reference in its entirety. Pharmaceutically acceptable solvate: The term “pharmaceutically acceptable solvate,” as used herein, refers to a crystalline form of a compound wherein molecules of a suitable solvent are incorporated in the crystal lattice. For example, solvates may be prepared by crystallization, recrystallization, or precipitation from a solution that includes organic solvents, water, or a mixture thereof. Examples of suitable solvents are ethanol, water (for example, mono-, di-, and tri-hydrates), N-methylpyrrolidinone (NMP), dimethyl sulfoxide (DMSO), N, N′-dimethylformamide (DMF), N, N′-dimethylacetamide (DMAC), 1,3-dimethyl-2-imidazolidinone (DMEU), 1,3-dimethyl-3,4,5,6-tetrahydro-2-(1H)-pyrimidinone (DMPU), acetonitrile (ACN), propylene glycol, ethyl acetate, benzyl alcohol, 2-pyrrolidone, benzyl benzoate, and the like. When water is the solvent, the solvate is referred to as a “hydrate.” In some embodiments, the solvent incorporated into a solvate is of a type or at a level that is physiologically tolerable to an organism to which the solvate is administered (e.g., in a unit dosage form of a pharmaceutical composition).

[0589] Stable: As used herein “stable” refers to a compound or entity that is sufficiently robust to survive isolation to a useful degree of purity from a reaction mixture, and preferably capable of formulation into an efficacious therapeutic agent.

[0590] Stabilized: As used herein, the term “stabilize”, “stabilized,” “stabilized region” means to make or become stable. In some embodiments, stability is measured relative to an absolute value. In some embodiments, stability is measured relative to a secondary status or state or to a reference compound or entity.

[0591] Standard CAR: As used herein, the term “standard CAR” refers to the standard design of a chimeric antigen receptor. The components of a CAR fusion protein including the extracellular scFv fragment, transmembrane domain and one or more intracellular domains are linearly constructed as a single fusion protein.

[0592] Stimulus response element (SRE): the term “stimulus response element (SRE), as used herein, is a component of an effector module which is joined, attached, linked to or associated with one or more payloads of the effector module and in some instances, is responsible for the responsive nature of the effector module to one or more stimuli. As used herein, the “responsive” nature of an SRE to a stimulus may be characterized by a covalent or non-covalent interaction, a direct or indirect association or a structural or chemical reaction to the stimulus. Further, the response of any SRE to a stimulus may be a matter of degree or kind. The response may be a partial response. The response may be a reversible response. The response may ultimately lead to a regulated signal or output. Such output signal may be of a relative nature to the stimulus, e.g., producing a modulatory effect of between 1 and 100 or a factored increase or decrease such as 2-fold, 3-fold, 4-fold, 5-fold, 10-fold or more. One non-limiting example of an SRE is a destabilizing domain (DD).

[0593] Subject: As used herein, the term “subject” or “patient” refers to any organism to which a composition in accordance with the present disclosure may be administered, e.g., for experimental, diagnostic, prophylactic, and/or therapeutic purposes. Typical subjects include animals (e.g., mammals such as mice, rats, rabbits, non-human primates, and humans) and/or plants.

[0594] T cell: A T cell is an immune cell that produces T cell receptors (TCRs). T cells can be naïve (not exposed to antigen; increased expression of CD62L, CCR7, CD28, CD3, CD127, and CD45RA, and decreased expression of CD45RO as compared to T_{CM}), memory T cells (T_{M}) (antigen-experienced and long-lived), and effector cells (antigen-experienced, cytotoxic). T_{M} can be further divided into subsets of central memory T cells (T_{CM}, increased expression of CD62L, CCR7, CD28, CD127, CD45RO, and CD95, and decreased expression of CD54RA as compared to naïve T cell and effector memory T cells (T_{EM}, decreased expression of CD62L, CCR7, CD28, CD45RA, and increased expression of CD127 as compared to naïve T cells or T_{CM}). Effector T cells (T_{E}) refers to antigen-experienced CD8+ cytotoxic T lymphocytes that have decreased expression of CD62L, CCR7, CD28, and are positive for granzyme and perform as compared to T_{CM}. Other exemplary T cells include regulatory T cells, such as CD4+CD25+(Foxp3+) regulatory T cells and Treg17 cells, as well as Tr1, Th3, CD8+CD28−, and Qa-1 restricted T cells.

[0595] T cell receptor: T cell receptor (TCR) refers to an immunoglobulin superfamily member having a variable antigen binding domain, a constant domain, a transmembrane region, and a short cytoplasmic tail, which is capable of specifically binding to an antigen peptide bound to a MHC receptor. A TCR can be found on the surface of a cell or in soluble form and generally is comprised of a heterodimer having α and β chains (also known as TCRα and TCRβ, respectively), or γ and δ chains (also known as TCRγ and TCRδ, respectively). The extracellular portion of TCR chains (e.g., α-chain, β-chain) contains two immunoglobulin domains, a variable domain (e.g., α-chain variable domain or V_{α}, β-chain variable domain or V_{β}) at the N terminus, and one constant domain (e.g., α-chain constant domain or C_{α} and β-chain constant domain or C_{β},) adjacent to the cell membrane. Similar to immunoglobulin, the variable domains contain complementary determining regions (CDRs) separated by framework regions (FRs). A TCR is usually associated with the CD3 complex to form a TCR complex. As used herein, the term “TCR complex” refers to a complex formed by the association of CD3 with TCR. For example, a TCR complex can be composed of a CD3γ chain, a CD36 chain, two CD3ε chains, a homodimer of CD3ζ chains, a TCRα chain, and a TCRβchain. Alternatively, a TCR complex can be composed of a CD3γ chain, a CD3δ chain, two CD3ε chains, a homodimer of CD3ζ chains, a TCRγ chain, and a TCRS chain. A “*component of a TCR complex,” as used herein, refers to a TCR chain (i.e., TCRα, TCRβ, TCRγ or TCRδ), a CD3 chain (i.e., CD3γ, CD3δ, CD3ε or CD3ζ), or a complex formed by two or more TCR chains or CD3 chains (e.g., a complex of TCRα and TCRβ, a complex of TCRγ and TCRδ, a complex of CD3ε and CD3δ, a complex of CD3γ and CD3ε, or a sub-TCR complex of TCRα, TCRβ, CD3γ, CD3δ, and two CD3ε chains.

[0596] Therapeutically effective amount: As used herein, the term “therapeutically effective amount” means an amount of an agent to be delivered (e.g., nucleic acid, drug, therapeutic agent, diagnostic agent, prophylactic agent, etc.) that is sufficient, when administered to a subject suffering from or susceptible to an infection, disease, disorder, and/or condition, to treat, improve symptoms of, diagnose, prevent, and/or delay the onset of the infection, disease, disorder, and/or condition. In some embodiments, a therapeutically effective amount is provided in a single dose. In some embodiments, a therapeutically effective amount is administered in a dosage regimen comprising a plurality of doses. Those skilled in the art will appreciate that in some embodiments, a unit dosage form may be considered to comprise a therapeutically effective amount of a particular agent or entity if it comprises an amount that is effective when administered as part of such a dosage regimen.

[0597] Treatment or treating: As used herein, the terms “treatment” or “treating” denote an approach for obtaining a beneficial or desired result including and preferably a beneficial or desired clinical result. Such beneficial or desired clinical results include, but are not limited to, one or more of the following: reducing the proliferation of (or destroying) cancerous cells or other diseased, reducing metastasis of cancerous cells found in cancers, shrinking the size of the tumor, decreasing symptoms resulting from the disease, increasing the quality of life of those suffering from the disease, decreasing the dose of other medications required to treat the disease, delaying the progression of the disease, and/or prolonging survival of individuals.

[0598] Tune: As used herein, the term “tune” means to adjust, balance or adapt one thing in response to a stimulus or toward a particular outcome. In one non-limiting example, the SREs and/or DDs of the present disclosure adjust, balance or adapt the function or structure of compositions to which they are appended, attached or associated with in response to particular stimuli and/or environments.

### EQUIVALENTS AND SCOPE

[0599] Those skilled in the art will recognize or be able to ascertain using no more than routine experimentation, many equivalents to the specific embodiments in accordance with the present disclosure described herein. The scope of the present disclosure is not intended to be limited to the above Description, but rather is as set forth in the appended claims.

[0600] In the claims, articles such as “a,” “an,” and “the” may mean one or more than one unless indicated to the contrary or otherwise evident from the context. Claims or descriptions that include “or” between one or more members of a group are considered satisfied if one, more than one, or all of the group members are present in, employed in, or otherwise relevant to a given product or process unless indicated to the contrary or otherwise evident from the context. The present disclosure includes embodiments in which exactly one member of the group is present in, employed in, or otherwise relevant to a given product or process. The present disclosure includes embodiments in which more than one, or the entire group members are present in, employed in or otherwise relevant to a given product or process.

[0601] It is also noted that the term “comprising” is intended to be open and permits but does not require the inclusion of additional elements or steps. When the term “comprising” is used herein, the term “consisting of” is thus also encompassed and disclosed.

[0602] Where ranges are given, endpoints are included. Furthermore, it is to be understood that unless otherwise indicated or otherwise evident from the context and understanding of one of ordinary skill in the art, values that are expressed as ranges can assume any specific value or subrange within the stated ranges in different embodiments of the present disclosure, to the tenth of the unit of the lower limit of the range, unless the context clearly dictates otherwise.

[0603] In addition, it is to be understood that any particular embodiment of the present disclosure that falls within the prior art may be explicitly excluded from any one or more of the claims. Since such embodiments are deemed to be known to one of ordinary skill in the art, they may be excluded even if the exclusion is not set forth explicitly herein. Any particular embodiment of the compositions of the present disclosure (e.g., any antibiotic, therapeutic or active ingredient; any method of production; any method of use; etc.) can be excluded from any one or more claims, for any reason, whether or not related to the existence of prior art.

[0604] It is to be understood that the words which have been used are words of description rather than limitation, and that changes may be made within the purview of the appended claims without departing from the true scope and spirit of the present disclosure in its broader aspects.

[0605] While the present disclosure has been described at some length and with some particularity with respect to the several described embodiments, it is not intended that it should be limited to any such particulars or embodiments or any particular embodiment, but it is to be construed with references to the appended claims so as to provide the broadest possible interpretation of such claims in view of the prior art and, therefore, to effectively encompass the intended scope of the present disclosure. The present disclosure is further illustrated by the following nonlimiting examples.

### EXAMPLES

### Example 1. Regulation of CD40L In Vitro in T Cells

[0606] CD40L constructs regulated by Carbonic anhydrase DDs were generated and cloned into lentiviral vectors. Purified T cells were thawed and cultured with aCD3 aCD28 Dynabeads (in the ratio of 3 beads to 1 T cell).

[0607] The constructs were transduced in T cells the next day. 48 hours after addition of virus, ligand dependent regulation was tested using 50 μM of Acetazolamide, or vehicle control (DMSO). 24 hours after the addition of ligand T cells were stained for CD40L expression and analyzed using FACS. In the presence of Acetazolamide, OT-001990 demonstrated an increase in CD40L expression compared to vehicle control and T cells expressing the empty vector without the insert. CD40L expression in response to increasing doses of Acetazolamide were measured in CD4+ and CD8+ T cells. Cells were treated with Acetazolamide for 24 hours and CD40L expression was measured using FACS. The results are shown as median fluorescence intensity in Table 10 and as percentage CD40L positive cells in Table 11.

TABLE 10
CD40L MFI

| Acetazolamide | | |
|---|---|---|
| (μM) | CD4+ | CD8+ |
| 0.01 | 112 | 105 |
| 0.05 | 123 | 104 |
| 0.2 | 185 | 136 |
| 0.8 | 481 | 307 |
| 3.1 | 840 | 380 |
| 12.5 | 2783 | 1599 |
| 50 | 3728 | 2184 |

TABLE 11
Percentage CD40L positive cells

| Acetazolamide | | |
|---|---|---|
| (μM) | CD4+ | CD8+ |
| 0.01 | 4.13 | 0.59 |
| 0.05 | 5.44 | 0.44 |
| 0.2 | 10.3 | 1.48 |
| 0.8 | 45.6 | 25.2 |
| 3.1 | 69.3 | 41.2 |
| 12.5 | 90.3 | 77.2 |
| 50 | 91.1 | 80.7 |

[0608] As shown in Table 10 and Table 11, ligand dependent regulation was observed both in CD4+ T cells as well as CD8+ T cells. however, the absolute MFI values and the percentage CD40L positive cells were higher in the CD4+ cells. The amount of Acetazolamide required to achieve stabilization of CD40L within the level of the ligand that can be achieved in humans.

### Example 2. Time Course Regulation of CD40L In Vitro in T Cells

[0609] CD40L constructs regulated by Carbonic anhydrase DDs were generated and cloned into lentiviral vectors. Purified T cells were thawed and cultured with aCD3 aCD28 Dynabeads (in the ratio of 3 beads to 1 T cell).

[0610] The constructs were transduced in T cells and dosed with 50 μM of Acetazolamide or vehicle control (DMSO) for 48 hours. A control of empty vector (EV) and constitutive CD40L (OT-001661; amino acid SEQ ID NO. 6067 and nucleic acid SEQ ID NO. 6068) was also evaluated. Cells were fixed at 2, 4, 6, 8, 24, and 48 hours and then T cells were stained for CD40L expression and analyzed using FACS. The results are shown as median fluorescence intensity in Table 12 and as percentage CD40L positive cells in Table 13.

TABLE 12
CD40L MFI

| | | | | | | | CA2 regulated CD40L | |
|---|---|---|---|---|---|---|---|---|
| | | | Constitutive CD40L | | CA2 regulated CD40L | | (OT-001990) 50 μM of | |
| | EV | | (OT-001661) | | (OT-001990) DMSO | | Acetazolamide | |
| Time (hours) | CD4+ | CD8+ | CD4+ | CD8+ | CD4+ | CD8+ | CD4+ | CD8+ |
| 2 | 1030 | 482 | 4042 | 2212 | 406 | 305 | 620 | 351 |
| 4 | 1371 | 457 | 4651 | 2994 | 381 | 270 | 1731 | 540 |
| 6 | 1239 | 360 | 3156 | 1773 | 302 | 224 | 2410 | 742 |
| 24 | 1533 | 321 | 9491 | 3563 | 400 | 221 | 10982 | 2376 |
| 48 | 1282 | 283 | 5639 | 2313 | 396 | 210 | 10384 | 3050 |

TABLE 13
Percentage CD40L positive cells

| | | | | | | | CA2 regulated CD40L | |
|---|---|---|---|---|---|---|---|---|
| | | | Constitutive CD40L (OT- | | CA2 regulated CD40L | | (OT-001990) 50 μM of | |
| | EV | | 001661) | | (OT-001990) DMSO | | Acetazolamide | |
| Time (hours) | CD4+ | CD8+ | CD4+ | CD8+ | CD4+ | CD8+ | CD4+ | CD8+ |
| 2 | 52 | 28.6 | 72.8 | 56.9 | 12.1 | 4.9 | 34.7 | 10.8 |
| 4 | 67.6 | 17.8 | 77 | 63.2 | 11.6 | 5.9 | 72.2 | 28 |
| 6 | 65 | 9.6 | 67.2 | 48.5 | 6.6 | 1 | 81.2 | 42.7 |
| 24 | 77.5 | 10.7 | 93.3 | 71.2 | 10.5 | 1.1 | 96.3 | 73.7 |
| 48 | 69.3 | 6.8 | 88.5 | 71.1 | 11.2 | 2.2 | 97.4 | 79.2 |

[0611] In the presence of Acetazolamide, OT-001990 demonstrated an increase in CD40L expression compared to vehicle control and T cells expressing the empty vector without the insert. CD40L expression in response to increasing doses of Acetazolamide were measured in CD4+ and CD8+ T cells. As shown in Table 12 and Table 13, ligand dependent regulation was observed both in CD4+ T cells as well as CD8+ T cells. The absolute MFI values and the percentage CD40L positive cells were higher in the CD4+ cells. Expression reached its peak at 24 hours with highest doses expressing higher than constitutive levels.

### Example 3. Regulation of CD40L in T Cells by CA2

[0612] To test regulation, activated T cells were lentivirally transduced with CA2 regulated CD40L (OT-001990) and a control of CD40L (OT-001661). Two days later, cells were treated with vehicle or 50 mM ligand for 24h as described in Table 14 after which they were analyzed for CD40L surface expression. The results for CD4+ and CD8+ cells and total cells are shown below. In the table, “Acz” is Acetazolamide.

TABLE 14
Percent of Cells expressing CD40L

| | | CD4+ | | CD8+ | | All Cells | |
|---|---|---|---|---|---|---|---|
| | | CD40L | | CD40L | | CD40L | |
| Construct (DD) | Ligand | positive | MFI | positive | MFI | positive | MFI |
| OT-001661 | N/A | 98.7% | 24489 | 97.8% | 14352 | 98% | 20451 |
| (CD40L | | | | | | | |
| control) | | | | | | | |
| OT-001990 | DMSO | 4.9% | 112 | 0.1% | 97.9 | 4% | 110 |
| (CA2) | | | | | | | |
| OT-001990 | 50 μM | 91.1% | 3728 | 80.7% | 2184 | 88.8% | 3304 |
| (CA2) | Acz | | | | | | |

[0613] Regulated expression with destabilizing domains significantly enhanced CD40L expression beyond endogenous levels. CA2 destabilizing domains show levels close to constitutive expression with ligand doses that are near clinically relevant levels.

### Example 4. Regulation of CD40L by CA2 Derived Destabilizing Domains

[0614] Regulation of CD40L my multiple carbonic anhydrase DDs was tested using the following constructs: OT-001990, OT-002072, OT-002073, OT-001968, OT-001969, OT-001970, OT-001971, OT-002074, OT-002075, OT-002076, OT-002077. HEK 293T cells were transiently transfected with the constructs. Cells were treated with 10 μM Acetazolamide for 24 hours and cell surface expression of CD40L was measured using flow cytometry. The results are shown in Table 15, where SR indicates stabilization ratio.

TABLE 15
Percent of Cells expressing CD40L

| Construct | DMSO | Acetazolamide | SR |
|---|---|---|---|
| OT-001990 | 12.4 | 41.8 | 3.37 |
| OT-001968 | 13.4 | 47.6 | 3.55 |
| OT-002077 | 12.2 | 23.6 | 1.93 |
| OT-002074 | 15.5 | 33.5 | 2.16 |
| OT-002075 | 14 | 35 | 2.50 |
| OT-002076 | 14 | 32.3 | 2.31 |

[0615] All constructs tested showed ligand dependent stabilization with stabilization ratios greater than 1. OT-001990 and OT-001968 demonstrated the highest stabilization ratio values. Similar ligand dependent stabilization of CD40L was observed when the following constructs were tested in HEK293T cells: OT-002072, OT-002073, OT-001968, OT-001969, OT-001970, and OT-001971.

[0616] Dose response studies were conducted in T cells. Cells were transduced with constructs indicated in Table 16. Acetazolamide dose response studies were performed at 4 and 9 days after transduction. The experiments were performed in duplicates (herein referred to as “repeat 1” and “repeat 2”. The results are provided in Table 16 and Table 17 as the Median fluorescence intensity of CD40L analyzed by flow cytometry.

TABLE 16
Dose response studies-Day 4

| | Cell | Acetazolamide (μM) | | | | | | |
|---|---|---|---|---|---|---|---|---|
| Construct | type | 0.01 | 0.05 | 0.2 | 0.8 | 3.1 | 12.5 | 50 |
| OT-00207 | CD4+ | 122 | 170 | 129 | 346 | 714 | 1667 | 2228 |
| (repeat 1) | CD8+ | 93.4 | 110 | 94.6 | 188 | 335 | 871 | 1143 |
| OT-002073 | CD4+ | 5.57 | 9.19 | 6.04 | 30.1 | 66.2 | 81.6 | 84 |
| (repeat 2) | CD8+ | 0.64 | 0.35 | 0.54 | 6.4 | 34.4 | 63.4 | 65.9 |
| OT-001990 | CD4+ | 112 | 123 | 185 | 481 | 840 | 2783 | 3728 |
| (repeat 1) | CD8+ | 105 | 104 | 136 | 307 | 380 | 1599 | 2184 |
| OT-001990 | CD4+ | 4.13 | 5.44 | 10.3 | 45.6 | 69.3 | 90.3 | 91.1 |
| (repeat 2) | CD8+ | 0.59 | 0.44 | 1.48 | 25.2 | 41.2 | 77.2 | 80.7 |
| OT-001968 | CD4+ | 127 | 132 | 162 | 242 | 420 | 1414 | 2851 |
| (repeat 1) | CD8+ | 110 | 112 | 135 | 174 | 376 | 803 | 1448 |
| OT-001968 | CD4+ | 5.49 | 5.85 | 8.22 | 17.3 | 39.7 | 78.7 | 84.8 |
| (repeat 2) | CD8+ | 0.87 | 0.61 | 1.89 | 4.9 | 30 | 62.1 | 69.9 |
| OT-001971 | CD4+ | 137 | 140 | 169 | 251 | 593 | 1342 | 1841 |
| (repeat 1) | CD8+ | 101 | 109 | 116 | 155 | 224 | 563 | 888 |
| OT-001971 | CD4+ | 7.63 | 6.64 | 9.41 | 17.1 | 57.6 | 80.5 | 82.5 |
| (repeat 2) | CD8+ | 0.87 | 0.75 | 0.72 | 3.17 | 16.7 | 49.4 | 62.1 |

TABLE 17
Dose response studies-Day 9

| | Cell | Acetazolamide (μM) | | | | | | |
|---|---|---|---|---|---|---|---|---|
| Construct | type | 0.01 | 0.05 | 0.2 | 0.8 | 3.1 | 12.5 | 50 |
| OT-002073 | CD4+ | 120 | 124 | 147 | 211 | 432 | 635 | 712 |
| (repeat 1) | CD8+ | 85.9 | 86.9 | 91 | 105 | 196 | 297 | 337 |
| OT-002073 | CD4+ | 6.42 | 6.68 | 8.9 | 16.3 | 40.1 | 56 | 59.9 |
| (repeat 2) | CD8+ | 0.47 | 0.52 | 0.8 | 1.17 | 8.26 | 24 | 30.1 |
| OT-001990 | CD4+ | 81.8 | 90.5 | 118 | 202 | 415 | 632 | 772 |
| (repeat 1) | CD8+ | 78.2 | 78.9 | 85 | 115 | 230 | 367 | 461 |
| OT-001990 | CD4+ | 2.53 | 3.48 | 6.1 | 15.1 | 38 | 55.3 | 62.8 |
| (repeat 2) | CD8+ | 0.11 | 0.17 | 0.3 | 1.33 | 12.1 | 32.9 | 43.5 |
| OT-001968 | CD4+ | 110 | 117 | 127 | 168 | 270 | 555 | 787 |
| (repeat 1) | CD8+ | 84.1 | 85.3 | 89 | 102 | 141 | 291 | 464 |
| OT-001968 | CD4+ | 5.15 | 6.01 | 6.6 | 10.9 | 22.4 | 51 | 62.8 |
| (repeat 2) | CD8+ | 0.22 | 0.42 | 0.3 | 0.96 | 3.41 | 23 | 44.6 |
| OT-001971 | CD4+ | 110 | 117 | 135 | 172 | 289 | 482 | 609 |
| (repeat 1) | CD8+ | 87.2 | 85.2 | 91 | 95.8 | 136 | 220 | 288 |
| OT-001971 | CD4+ | 5.27 | 6.26 | 7.9 | 11.6 | 25 | 44.9 | 53.9 |
| (repeat 2) | CD8+ | 0.32 | 0.47 | 0.6 | 0.53 | 2.48 | 12.7 | 22.7 |

[0617] The results in Table 16 and Table 17 suggest that carbonic anhydrase DD based regulation of CD40L is effective in regulating CD40L expression when treated with Acetazolamide. CD4 positive cells showed a greater increase in CD40L expression when compared to CD8 positive cells, likely due to the endogenous CD40L expression in CD4 cells.

[0618] Healthy donor human T cells were activated, transduced with CD40L-expressing lentivirus vector (LV) for OT-001990 and expanded using aCD3 aCD28 Dynabeads. T cells were frozen on day 9 post expansion. Acetazolamide was added to cells on day 3, day 8, post thaw, and post thaw after 24 hours of re-stimulation with aCD3 and aCD28. T cells were stained for CD40L expression 24 hours after the addition of ligand. The results are shown in Table 18.

TABLE 18
Expression of CD40L in OT-001990 T cells

| Acetazolamide | | | Post | Post |
|---|---|---|---|---|
| (dose μM) | Day 4 | Day 9 | Thaw | Thaw + Stim |
| 0.01 | | 282 | 178 | 995 |
| 0.05 | 310 | 319 | 175 | 954 |
| 0.2 | 381 | 339 | 180 | 999 |
| 0.8 | 1119 | 641 | 198 | 1406 |
| 3.1 | 2381 | 1486 | 273 | 2314 |
| 12.5 | 5517 | 2970 | 525 | 4355 |
| 50 | 5427 | 3143 | 688 | 4860 |

[0619] As shown in Table 18, regulation was observed in re-stimulated cells post thaw but not in cells without restimulation. These data show that regulation of CD40L is sensitive to T cell activation status.

[0620] Healthy donor human T cells were activated, transduced with CD40L-expressing lentivirus vector (LV), expanded, and frozen. Allogeneic human monocytes were differentiated into monocyte derived dendritic cells (moDCs) and also frozen. In vitro cultures were set up with freshly thawed cells which were placed in culture for 48 hours. Supernatant was collected and analyzed by meso scale discovery (MSD) for interleukin 12 (IL12). The results are shown in Table 19. In Table 19, Acetazolamide is denoted as “ACZ”.

TABLE 19
IL 12 expression

| Description | pg/mL IL-12 |
|---|---|
| moDC + Empty Vector | 0.18 |
| moDC + Empty Vector (Stim) | 5.84 |
| moDC + OT-001990 DMSO | 0.52 |
| moDC + OT-001990 + Stim | 0.84 |
| moDC + OT-001990 50 μM ACZ | 0.40 |
| moDC + OT-001990 50 μM ACZ + Stim | 472.28 |

[0621] Similar to the CD40L regulation, IL12 expression by CD40L expressing T cells was sensitive to the T cell activation status.

### Example 5. Regulation of CA2 CD40L-CAR T Cells

[0622] To measure the effect of CD40L expression that is tuned by the biocircuits of the present disclosure in the context of CARs, T cells expressing any of the CA2 CD40L-CAR constructs described herein were co-cultured with monocyte derived dendritic cells (DCs).

[0623] In vitro cultures were set up by adding 1×10⁴ DCs into culture with 1×10⁵ Nalm6 and 1×10⁵ CAR+ T cells. 50 μM of Acetazolamide was added at the same time as the cells in culture. Supernatants were collected 24 hours later and analyzed for IFNg and IL-12 by MSD assay. OT-001661 (SEQ ID NO. 6067; encoded by SEQ ID NO. 6068), that expressed CD40L payloads constitutively was used as control. The results are provided in Table 20.

TABLE 20
IFN and IL12 levels

| | IFNg | IL12 |
|---|---|---|
| Description | (pg/mL) | (pg/mL) |
| DC + EV + Nalm6 | 2042.76 | - |
| DC + OT-001661 + Nalm6 | 1579.21 | 58.88 |
| DC + OT-001990 Vehicle + Nalm6 | 152.84 | - |
| DC + OT-001990 + 3050 μM of Acetazolamide + Nalm6 | 135.50 | - |
| DC + OT-001407 + Nalm6 | 33363.09 | 21.289 |
| DC + OT-001605 + Nalm6 | 58239.22 | 366.83 |
| DC + OT-002156 Vehicle + Nalm6 | 70686.46 | 1983. |
| DC + OT-002156 + 50 μM of Acetazolamide + Nalm6 | 76679.21 | 129.18 |

[0624] IL12 secretion was increased in the supernatants of all groups except DC+OT-001990. Detectable IFN gamma levels were observed in DC+OT-001407+Nalm6; DC+OT-001605+Nalm6; DC+OT-002156 Vehicle+Nalm6; and DC+OT-002156+50 μM of Acetazolamide+Nalm6 supernatants. Ligand dependent regulation of IFN gamma was observed with OT-002156. These data show that CAR driven activation of T cells induces CD40L dependent IL-12 production by autologous DCs in vitro.

### Example 6. Reduced Shedding with CD40L

[0625] To measure the effect of CD40L expression and shedding as a result of the replacement of a cleavage site with a linker sequence, HEK293T cells were transiently transfected with a CD40L control (OT-001661), CA2 regulated CD40L (OT-001990) or CA2 regulated CD40L-shed (OT-002172) and treated with vehicle (DMSO) or 10 μM Acetazolamide (ACZ) for 24 hours before cell culture medium was analyzed by ELISA for soluble CD40L. As shown in Table 21, reduced shedding was seen when the cleavage site was replaced with a linker sequence.

TABLE 21
Soluble CD40L (sCD40L)

| | sCD40L (pg/mL) | |
|---|---|---|
| Description | Repeat 1 | Repeat 2 |
| OT-001661 | 2900 | — |
| OT-001990 + DMSO | 1694.2 | 1534.5 |
| OT-001990 + 10 μM ACZ | 1728.8 | 1760.5 |
| OT-002172 + DMSO | 160.8 | 144.3 |
| OT-002172 + 10 μM ACZ | 178.9 | 177.4 |

[0626] Additionally, OT-001990 and OT-02172 were transfected into stably transduced Jurkat cells and then the cells were treated with the doses of Acetazolamide (ACZ) for 24 hours and the percent positive CD40L+ cells and the MFI are shown in Table 22.

TABLE 22
Percent positive CD40L cells and MFI after 24 hours

| Percent CD40L+ | | | | | MFI | | | | |
|---|---|---|---|---|---|---|---|---|---|
| μM Dose of | OT-001990 | | OT-002172 | | μM Dose of | OT-001990 | | OT-002172 | |
| ACZ | Repeat 1 | Repeat 2 | Repeat 1 | Repeat 2 | ACZ | Repeat 1 | Repeat 2 | Repeat 1 | Repeat 2 |
| 200 | 98.1 | — | 95.2 | — | 200 | — | — | — | — |
| 175 | 97.9 | 97.6 | 93.2 | 93.3 | 175 | 3101 | 3172 | 2248 | 2219 |
| 100 | 97.6 | — | 93.8 | 93.8 | 100 | 3101 | 3208 | 2102 | 2074 |
| 50 | 97.1 | 97.5 | 92.5 | 92.6 | 50 | 2885 | 2971 | 1974 | 2008 |
| 25 | 96.7 | 97.3 | 91.9 | 91.4 | 25 | 2570 | 2622 | 1796 | 1796 |
| 12.5 | 95.9 | 96 | 89.5 | 89.3 | 12.5 | 2176 | 2180 | 1475 | 1510 |
| 6.25 | 93.4 | 93.9 | 84.6 | 84.1 | 6.25 | 1586 | 1593 | 1110 | 1086 |
| 3.125 | 85.4 | 84.5 | 72.9 | 72.4 | 3.125 | 988 | 956 | 703 | 706 |
| 1.5625 | 63.2 | 62 | 48.1 | 48 | 1.5625 | 526 | 516 | 380 | 383 |
| 0.78125 | 22.4 | 22.9 | 17.8 | 18.1 | 0.78125 | 214 | 214 | 178 | 183 |
| 0.390625 | 4.1 | 4.4 | 4.7 | 4.8 | 0.390625 | 80.9 | 78 | 75.1 | 75.1 |
| 0.195313 | 1.9 | 1.6 | 1.5 | 1.4 | 0.195313 | 31.7 | 27.4 | 26 | 34.6 |
| 0.097656 | 0.9 | 1.0 | 0.8 | 0.9 | 0.097656 | 18.8 | 18.8 | 13 | 18.8 |
| 0.048828 | 0.8 | 1 | 0.6 | 0.5 | 0.048828 | 7.21 | 5.77 | 5.77 | 13 |

[0627] While the present disclosure has been described at some length and with some particularity with respect to the several described embodiments, it is not intended that it should be limited to any such particulars or embodiments or any particular embodiment, but it is to be construed with references to the appended claims so as to provide the broadest possible interpretation of such claims in view of the prior art and, therefore, to effectively encompass the intended scope of the present disclosure.

[0628] All publications, patent applications, patents, and other references mentioned herein are incorporated by reference in their entirety. In case of conflict, the present specification, including definitions, will control. In addition, section headings, the materials, methods, and examples are illustrative only and not intended to be limiting.

The application's sequence listing, which the Patent Office published only in electronic form, follows.

SEQUENCE LISTING (6144 sequences)

SEQ ID NO: 1-4 - skipped (4 entries)

SEQ ID NO: 5 - protein, 240 aa, Homo sapiens
MIETYNQTSPRSAATGLPISMKIFMYLLTVFLITQMIGSALFAVYLHRRLDKIEDERNLHEDFVFMKTIQRCNTGERSLSLLNCEEIKSQFEGFVKDIMLNKEETKKENSFEMQKVLQWAEKGYYTMSNNLVTLENGKQLTVKRQGLYYIYAQVTFCSNREASSQAPFIASLCLKSPGRFERILLRAANTHSSAKPCGQQSIHLGGVFELQPGASVFVNVTDPSQVSHGTGFTSFGLLKL

SEQ ID NO: 6 - protein, 261 aa, Homo sapiens
MIETYNQTSPRSAATGLPISMKIFMYLLTVFLITQMIGSALFAVYLHRRLDKIEDERNLHEDFVFMKTIQRCNTGERSLSLLNCEEIKSQFEGFVKDIMLNKEETKKENSFEMQKGDQNPQIAAHVISEASSKTTSVLQWAEKGYYTMSNNLVTLENGKQLTVKRQGLYYIYAQVTFCSNREASSQAPFIASLCLKSPGRFERILLRAANTHSSAKPCGQQSIHLGGVFELQPGASVFVNVTDPSQVSHGTGFTSFGLLKL

SEQ ID NO: 7-10 - skipped (4 entries)

SEQ ID NO: 11 - DNA, 1720 bp, Homo sapiens
accatttcaactttaacacagcatgatcgaaacatacaaccaaacttctccccgatctgcggccactggactgcccatcagcatgaaaatttttatgtatttacttactgtttttcttatcacccagatgattgggtcagcactttttgctgtgtatcttcatagaaggttggacaagatagaagatgaaaggaatcttcatgaagattttgtattcatgaaaacgatacagagatgcaacacaggagaaagatccttatccttactgaactgtgaggagattaaaagccagtttgaaggctttgtgaaggatataatgttaaacaaagaggagacgaagaaagaaaacagctttgaaatgcaaaaagtgttacagtgggctgaaaaaggatactacaccatgagcaacaacttggtaaccctggaaaatgggaaacagctgaccgttaaaagacaaggactctattatatctatgcccaagtcaccttctgttccaatcgggaagcttcgagtcaagctccatttatagccagcctctgcctaaagtcccccggtagattcgagagaatcttactcagagctgcaaatacccacagttccgccaaaccttgcgggcaacaatccattcacttgggaggagtatttgaattgcaaccaggtgcttcggtgtttgtcaatgtgactgatccaagccaagtgagccatggcactggcttcacgtcctttggcttactcaaactctgaacagtgtcaccttgcaggctgtggtggagctgacgctgggagtcttcataatacagcacagcggttaagcccaccccctgttaactgcctatttataaccctaggatcctccttatggagaactatttattatacactccaaggcatgtagaactgtaataagtgaattacaggtcacatgaaaccaaaacgggccctgctccataagagcttatatatctgaagcagcaaccccactgatgcagacatccagagagtcctatgaaaagacaaggccattatgcacaggttgaattctgagtaaacagcagataacttgccaagttcagttttgtttctttgcgtgcagtgtctttccatggataatgcatttgatttatcagtgaagatgcagaagggaaatggggagcctcagctcacattcagttatggttgactctgggttcctatggccttgttggagggggccaggctctagaacgtctaacacagtggagaaccgaaaccccccccccccccccgccaccctctcggacagttattcattctctttcaatctctctctctccatctctctctttcagtctctctctctcaacctctttcttccaatctctctttctcaatctctctgtttccctttgtcagtctcttccctcccccagtctctcttctcaatccccctttctaacacacacacacacacacacacacacacacacacacacacacacacacacacagagtcaggccgttgctagtcagttctcttctttccaccctgtccctatctctaccactatagatgagggtgaggagtagggagtgcagccctgagcctgcccactcctcattacgaaatgactgtatttaaaggaaatctattgtatctacctgcagtctccattgtttccagagtgaacttgtaattatcttgttatttattttttgaataataaagacctcttaacatta

SEQ ID NO: 12 - DNA, 1817 bp, Homo sapiens
catgctgcctctgccaccttctctgccagaagataccatttcaactttaacacagcatgatcgaaacatacaaccaaacttctccccgatctgcggccactggactgcccatcagcatgaaaatttttatgtatttacttactgtttttcttatcacccagatgattgggtcagcactttttgctgtgtatcttcatagaaggttggacaagatagaagatgaaaggaatcttcatgaagattttgtattcatgaaaacgatacagagatgcaacacaggagaaagatccttatccttactgaactgtgaggagattaaaagccagtttgaaggctttgtgaaggatataatgttaaacaaagaggagacgaagaaagaaaacagctttgaaatgcaaaaaggtgatcagaatcctcaaattgcggcacatgtcataagtgaggccagcagtaaaacaacatctgtgttacagtgggctgaaaaaggatactacaccatgagcaacaacttggtaaccctggaaaatgggaaacagctgaccgttaaaagacaaggactctattatatctatgcccaagtcaccttctgttccaatcgggaagcttcgagtcaagctccatttatagccagcctctgcctaaagtcccccggtagattcgagagaatcttactcagagctgcaaatacccacagttccgccaaaccttgcgggcaacaatccattcacttgggaggagtatttgaattgcaaccaggtgcttcggtgtttgtcaatgtgactgatccaagccaagtgagccatggcactggcttcacgtcctttggcttactcaaactctgaacagtgtcaccttgcaggctgtggtggagctgacgctgggagtcttcataatacagcacagcggttaagcccaccccctgttaactgcctatttataaccctaggatcctccttatggagaactatttattatacactccaaggcatgtagaactgtaataagtgaattacaggtcacatgaaaccaaaacgggccctgctccataagagcttatatatctgaagcagcaaccccactgatgcagacatccagagagtcctatgaaaagacaaggccattatgcacaggttgaattctgagtaaacagcagataacttgccaagttcagttttgtttctttgcgtgcagtgtctttccatggataatgcatttgatttatcagtgaagatgcagaagggaaatggggagcctcagctcacattcagttatggttgactctgggttcctatggccttgttggagggggccaggctctagaacgtctaacacagtggagaaccgaaaccccccccccccccccgccaccctctcggacagttattcattctctttcaatctctctctctccatctctctctttcagtctctctctctcaacctctttcttccaatctctctttctcaatctctctgtttccctttgtcagtctcttccctcccccagtctctcttctcaatccccctttctaacacacacacacacacacacacacacacacacacacacacacacacacacacagagtcaggccgttgctagtcagttctcttctttccaccctgtccctatctctaccactatagatgagggtgaggagtagggagtgcagccctgagcctgcccactcctcattacgaaatgactgtatttaaaggaaatctattgtatctacctgcagtctccattgtttccagagtgaacttgtaattatcttgttatttattttttgaataataaagacctcttaacatta

SEQ ID NO: 13 - protein, 247 aa, Artificial Sequence
  source: /note="Description of Artificial Sequence: Synthetic scFv sequence"
MAQVQLVQSGAEVKEPGSSVKVSCKASGGTFSSYAIYWVRQAPGQGLEWMGWINPDSGDTNSAQQFQGRVTMTRDTSISTAYMELSRLRSDDTAMYYCARPPRGDGPDYWGQGTLVTVSSGGGGGSEIVLTQSPGTLSLSPGERATLSCRASQSVSSSYLAWYQQKPGQAPRLLIYGASSRATGIPDRFSGSGSGTDFTLTISRLEPEDFAVYYCQQYGSSPRTFGQGTKVDIKRGLGGLVDYKDDD

SEQ ID NO: 14 - protein, 249 aa, Artificial Sequence
  source: /note="Description of Artificial Sequence: Synthetic scFv sequence"
MAQVQLVQSGAEVKEPGSSVKVSCKASGGTFSSYAIYWVRQAPGQGLEWMGWINPDSGDTNSAQQFQGRVTMTRDTSISTAYMELSRLRSDDTAMYYCARPPRGDGPDYWGQGTLVTVSSGGGGGSEIVLTQSPGTLSLSPGERATLSCRASQSVSSSYLAWYQQKPGQAPRLLIYGASSRATGIPDRFSGSGSGTDFTLTISRLEPEDFAVYYCQQYGSSPRTFGQGTKVDIKRGLGGLVDYKDDDDK

SEQ ID NO: 15 - protein, 261 aa, Artificial Sequence [sequence omitted]

SEQ ID NO: 16 - protein, 258 aa, Artificial Sequence
  source: /note="Description of Artificial Sequence: Synthetic scFv sequence"
DIQMTQSPSSLSASVGDRVTITCRASQGIRNYLAWYQQKPGKAPKLLIYAASTLQSGVPSRFSGSGSGTDFTLTISSLQPEDVATYYCQRYNRAPYTFGQGTKVEIKRGSTSGSGKPGSGEGSTKGEVQLVESGGGLVQPGRSLRLSCAASGFTFDDYAMHWVRQAPGKGLEWVSAITWNSGHIDYADSVEGRFTISRDNAKNSLYLQMNSLRAEDTAVYYCAKVSYLSTASSLDYWGQGTLVTVSSGGGGSGGGGSC

SEQ ID NO: 17 - protein, 242 aa, Artificial Sequence
  source: /note="Description of Artificial Sequence: Synthetic scFv sequence"
ALQLQQSGAELVRPGASVTLSCKASGYTFTDYEMHWVKQTPVHGLEWIGAIDPETGGTAYNQKFEGKAILTADKSSSTAYMELRSLTSEDSPVYYCARRRYYGSSSFDYWGQGTTLTVSSGGGGSGGGGSGGGGSDVQMIQTPSSLSASLGDRVTISCRASQDIGNYLNWYQQKPDGTVKLLIYYTSRLHSGVPSRFSGSGSGTEYSLTISNLEQEDIATYFCQQGSALPPTFGGGTKLEIN

SEQ ID NO: 18 - protein, 246 aa, Artificial Sequence
  source: /note="Description of Artificial Sequence: Synthetic scFv sequence"
DVKLQESGPGLVAPSQSLSITCTVSGFSLTSYAVSWVRQPPGKGLEWLGIIWSGGATNYNSALKSRLSISKDNSKSQVFLKMNGLQTDDTARYYCAREHYYGSSAMDYWGQGASITVSSGGGGSGGGGSGGGGSGIVMTQSPLSLPVSLGDQASISCRSSQSIVHSYGNTYLFWYLQKPGQSPKLLIYRVSNRFSGVPDRFSGSGSGTNFTLKISRVEAEDMGVYYCFQGTHVPYTFGGGTKLEIK

SEQ ID NO: 19 - protein, 245 aa, Artificial Sequence
  source: /note="Description of Artificial Sequence: Synthetic scFv sequence"
DVQLQESGPVLVKTGASVKMSCTASGYTFTDHFMDWVKQSHGKSLEWIGSLNPYSGGTSYNQKFKGKATLTVDKSSSTAYMELNSLTSVDSAVYYCARHNWGAYFDYWGQGTTLTVSSGGGGSGGGGSGGGGSDIVMTQAAPSVPVTPGESVSISCRSSKSLLHSNGNTYLYWFLQRPGQSPQRLIYYMSNLASGVPDRFSGRGSGTDFTLRISRVEAEDVGVYYCMQGLEDPYTFGGGTKLEIK

SEQ ID NO: 20 - protein, 246 aa, Artificial Sequence
  source: /note="Description of Artificial Sequence: Synthetic scFv sequence"
QVQLQQSGAELVKPGASVKISCKASGYAFSSYWMNWVKQRPGKGLEWIGQIYPGDGDTTYNGKFKGKATLTADKSSSTVYMQLNSLTSEDSAVYFCVRYYYGSSGYFDYWGQGTTLTVSSGGGGSGGGGSGGGGSDVQMIQTPDSLAVSLGQRATISCRASESVDNYGISFMHWYQQKPGQSPKLLIYRASNLESGIPARFSGSGSRTDFTLTINPVETDDVATYYCQQNNKDPPTFGGGTKLEIK

SEQ ID NO: 21 - protein, 248 aa, Artificial Sequence
  source: /note="Description of Artificial Sequence: Synthetic scFv sequence"
QVQLQQSGAEVKKPGSSVKVSCKASGFSLTSYAISWVRQAPGQGLEWMGGIIWSGGATNYAQKFQGRVTITADESTSTAYMELSSLRSEDTAVYYCAREHYYGSSAMDYWWGQGTMVTVSSGGGGSGGGGSGGGGSEIVLTQSPATLSLSPGERATLSCRASQSIVHSYGNTYAWYQQKPGQAPRLLIYRVSRATGIPARFSGSGSGTDFTLTISSLEPEDFAVYYCFQGTHVPYTFFGQGTKLEIKR

SEQ ID NO: 22 - protein, 247 aa, Artificial Sequence
  source: /note="Description of Artificial Sequence: Synthetic scFv sequence"
QVQLQQSGAEVKKPGSSVKVSCKASGYAFSSYISWVRQAPGQGLEWMGGQIYPGDGDTNYAQKFQGRVTITADESTSTAYMELSSLRSEDTAVYYCVRYYYGSSGYFDYWWGQGTMVTVSSGGGGSGGGGSGGGGSEIVLTQSPATLSLSPGERATLSCRASESVDNYGISFAWYQQKPGQAPRLLIYRASRATGIPARFSGSGSGTDFTLTISSLEPEDFAVYYCQQNNKDPPTFFGQGTKLEIKR

SEQ ID NO: 23 - protein, 246 aa, Artificial Sequence
  source: /note="Description of Artificial Sequence: Synthetic scFv sequence"
QVQLQQSGAEVKKPGSSVKVSCKASGYTFTDHFISWVRQAPGQGLEWMGGLNPYSGGTNYAQKFQGRVTITADESTSTAYMELSSLRSEDTAVYYCARHNWGAYFDYWWGQGTMVTVSSGGGGSGGGGSGGGGSEIVLTQSPATLSLSPGERATLSCRASKSLLHSNGNTYAWYQQKPGQAPRLLIYYMSRATGIPARFSGSGSGTDFTLTISSLEPEDFAVYYCMQGLEDPYTFFGQGTKLEIKR

SEQ ID NO: 24 - protein, 243 aa, Artificial Sequence
  source: /note="Description of Artificial Sequence: Synthetic scFv sequence"
QVQLQQSGAEVKKPGSSVKVSCKASGYTFTDYEISWVRQAPGQGLEWMGGIDPETGGTNYAQKFQGRVTITADESTSTAYMELSSLRSEDTAVYYCARRRYYGSSSFDYWWGQGTMVTVSSGGGGSGGGGSGGGGSEIVLTQSPATLSLSPGERATLSCRASQDIGNYAWYQQKPGQAPRLLIYYTSRATGIPARFSGSGSGTDFTLTISSLEPEDFAVYYCQQGSALPPTFFGQGTKLEIKR

SEQ ID NO: 25 - protein, 242 aa, Artificial Sequence
  source: /note="Description of Artificial Sequence: Synthetic scFv sequence"
QVQLQQSGAEVKKPGSSVKVSCKASGYTFTDYEISWVRQAPGQGLEWMGGIDPETGGTNYAQKFQGRVTITADESTSTAYMELSSLRSEDTAVYYCARRYYGSSSFDYWWGQGTMVTVSSGGGGSGGGGSGGGGSEIVLTQSPATLSLSPGERATLSCRASQDIGNYAWYQQKPGQAPRLLIYYTSRATGIPARFSGSGSGTDFTLTISSLEPEDFAVYYCQQGSALPPTFFGQGTKLEIKR

SEQ ID NO: 26 - protein, 477 aa, Artificial Sequence
  source: /note="Description of Artificial Sequence: Synthetic scFv sequence"
QVQLQQSGAELARPGASVKMSCKASGYTFTRYTMHWVKQRPGQGLEWIGYINPSRGYTNYNQKFKDKATLTTDKSSSTAYMQLSSLTSEDSAVYYCARYYDDHYCLDYWGQGTTLTVSSGGGGSGGGGSGGGGSQIVLTQSPAIMSASPGEKVTMTCSASSSVSYMNWYQQKSGTSPKRWIYDTSKLASGVPAHFRGSGSGTSYSLTISGMEAEDAATYYCQQWSSNPFTFGSGTKLEINRGAAAEPKSCDKTHTCPPCPAPELLGGPSVFLFPPKPKDTLMISRTPEVTCVVVDVSHEDPEVKFNWYVDGVEVHNAKTKPREEQYNSTYRVVSVLTVLHQDWLNGKEYKCKVSNKALPAPIEKTISKAKGQPREPQVYTLPPSRDELTKNQVSLTCLVKGFYPSDIAVEWESNGQPENNYKTTPPVLDSDGSFFLYSKLTVDKSRWQQGNVFSCSVMHEALHNHYTQKSLSLSPGK

SEQ ID NO: 27 - protein, 241 aa, Artificial Sequence
  source: /note="Description of Artificial Sequence: Synthetic scFv sequence"
QVQLQQSGAELVKPGASVKLSCKTSGYTFTNYDINWVRQRPGQGLEWIGWIFPGDDSTQYNEKFKGKATLTTDTSSSTAYMQLSRLTSEDSAVYFCARQTTGTWFAYWGQGTLVTVSAGGGGSGGGGSGGGGSDIVMTQSPATLSVTPGDRVTLSCRASQSISDYLYWYQQKSHESPRLLIKYASQSISGIPSRFSGSGSGSDFTLSINSVEPEDVGVYYCQNGHSFPLTFGAGTKLELKR

SEQ ID NO: 28 - protein, 241 aa, Artificial Sequence
  source: /note="Description of Artificial Sequence: Synthetic scFv sequence"
QVQLVQSGAEVVKPGASCKLSCKTSGYTFTNYDINWVRQRPGQGLEWIGWIFPGDGSTQYNEKFKGKATLTTDTSTSTAYMELSSLRSEDTAVYFCARQTTATWFAYWGQGTLVTVSSGGGGSGGGGSGGVGSEIVMTQSPATLSVSPGERVTLSCRASQSIGDYLYWYQQKSHESPRLLIKYASQSISGIPARFSGSGSGSEFTLTINSVEPEDVGVYYCQNGHSFPLTFGQGTKLELKR

SEQ ID NO: 29 - protein, 200 aa, Artificial Sequence
  source: /note="Description of Artificial Sequence: Synthetic scFv sequence"
QVQLVQSGAEVVKPGASVKLSCKASGYTFTNYDINWVRQRPEQGLEWIGWIFPGDGSTQYNEKFKGKATLTTDTSTSTAYMELSSLRSEDTAVYFCARQTTATWFAYWGQGTLVTVSSGGGGSGGGGSGGGGSEIVMTQSPATLSVSPGERVSLSCRASQSISDYLHWYQQKSHESPRLLIKYASQSISGIPARFSGSGS

SEQ ID NO: 30 - protein, 241 aa, Artificial Sequence
  source: /note="Description of Artificial Sequence: Synthetic scFv sequence"
QVQLVQSGAEVVKPGASVKLSCKASGYTFTNYDINWVRQRPEQGLEWIGWIFPGDGSTQYNEKFKGKATLTTDTSTSTAYMELSSLRSEDTAVYFCARQTTATWFAYWGQGTLVTVSSGGGGSGGGGSGGGGSEIVMTQSPATLSVSPGERVSLSCRASQSISDYLHWYQQKSHESPRLLIKYASQSISGIPARFSGSGSGSEFTLTINSVEPEDVGVYYCQNGHSFPLTFGQGTKLELKR

SEQ ID NO: 31 - protein, 241 aa, Artificial Sequence
  source: /note="Description of Artificial Sequence: Synthetic scFv sequence"
QVQLVQSGAEVVKPGASVKLSCKTSGYTFTNYDINWVRQRPGQGLEWIGWIFPGDDSTQYNEKFKGKATLTTDTSTSTAYMELSSLRPEDTAVYFCARQTTGTWFAYWGQGTLVTVSSGGGGSGGGGSGGGGSEIVMTQSPATLSVSPGERVTLSCRASQSISDYLYWYQQKSHESPRLLIKYASQSIPGIPARFSGSGSGSEFTLTINSVEPEDVGVYYCQNGHSFPLTFGQGTKLELKR

SEQ ID NO: 32 - protein, 241 aa, Artificial Sequence
  source: /note="Description of Artificial Sequence: Synthetic scFv sequence"
QVQLVQSGAEVVKPGASVKLSCKTSGYTFTNYDINWVRQRPGQGLEWIGWIFPGDDSTQYNEKFKGKATLTTDTSTSTAYMELSSLRSEDTAVYFCARQTTGTWFAYWGQGTLVTVSSGGGGSGGGGSGGGGSEIVMTQSPATLSVSPGERVTLSCRASQSISDYLYWYQQKSHESPRLLIKYASQSISGIPARFSGSGSGSEFTLTINSVEPEDVGVYYCQNGHSFPLTFGQGTKLELKR

SEQ ID NO: 33 - protein, 200 aa, Artificial Sequence
  source: /note="Description of Artificial Sequence: Synthetic scFv sequence"
QVQLVQSGAEVVKPGASVKLSCKTSGYTFTNYDINWVRQRPGQGLEWIGWIFPGDGSTQYNEKFKGKATLTTDTSTSTAYLELSSLGSEDTAVYFCARQTTGTWFAYWGQGTLVTVSSGGGGSGGGGSGGGGSEIVMTQSPATLSVSPGERVTLSCRASQSISDYLYWYQQKSHESPRLLIKYASQSISGIPARFSGSGS

SEQ ID NO: 34 - protein, 241 aa, Artificial Sequence
  source: /note="Description of Artificial Sequence: Synthetic scFv sequence"
QVQLVQSGAEVVKPGASVKLSCKTSGYTFTNYDINWVRQRPGQGLEWIGWIFPGDGSTQYNEKFKGKATLTTDTSTSTAYLELSSLGSEDTAVYFCARQTTGTWFAYWGQGTLVTVSSGGGGSGGGGSGGGGSEIVMTQSPATLSVSPGERVTLSCRASQSISDYLYWYQQKSHESPRLLIKYASQSISGIPARFSGSGSGSEFTLTINSVEPEDVGVYYCQNGHSFPLTFGQGTKLELKR

SEQ ID NO: 35 - protein, 200 aa, Artificial Sequence
  source: /note="Description of Artificial Sequence: Synthetic scFv sequence"
QVQLVQSGAEVVKPGASVKLSCKTSGYTFTNYDINWVRQRPGQGLEWIGWIFPGDGSTQYNEKFKGKATLTTDTSTSTAYMELSSLGSEDTAVYFCARQTTATWFAYWGQGTLVTVSSGGGGSGGGGSGGGGSEIVMTQSPATLSVSPGERVTLSCRASQSISDYLYWYQQKSHESPRLLIKYASQSISGIPARFSGSGS

SEQ ID NO: 36 - protein, 241 aa, Artificial Sequence
  source: /note="Description of Artificial Sequence: Synthetic scFv sequence"
QVQLVQSGAEVVKPGASVKLSCKTSGYTFTNYDINWVRQRPGQGLEWIGWIFPGDGSTQYNEKFKGKATLTTDTSTSTAYMELSSLGSEDTAVYFCTRQTTATWFAYWGQGTLVTVSSGGGGSGGGGSSGGGSEIVMTQSPATLSVSPGERVTLSCRASQSIGDYLYWYQQKSHESPRLLIKYASQSISGIPARFSGSGSGSEFTLTINSVEPEDVGVYYCQNGHSFPLTFGQGTKLELKR

SEQ ID NO: 37 - protein, 200 aa, Artificial Sequence
  source: /note="Description of Artificial Sequence: Synthetic scFv sequence"
QVQLVQSGAEVVKPGASVKLSCKTSGYTFTNYDINWVRQRPGQGLEWIGWIFPGDGSTQYNEKFKGKATLTTDTSTSTAYMELSSLRSEDTAVYFCARQTTATWFAYWGQGTLVTVSSGGGGSGGGGSGGGGSEIVMTQSPATLSVSPGERVTLSCRASQSISDYLYWYQQKSHESPRLLIKYASQSISGIPARFSGSGS

SEQ ID NO: 38 - protein, 241 aa, Artificial Sequence
  source: /note="Description of Artificial Sequence: Synthetic scFv sequence"
QVQLVQSGAEVVKPGASVKLSCKTSGYTFTNYDINWVRQRPGQGLEWIGWIFPGDGSTQYNEKFKGKATLTTDTSTSTAYMELSSLRSEDTAVYFCARQTTATWFAYWGQGTLVTVSSGGGGSGGGGSGGGGSEIVMTQSPATLSVSPGERVTLSCRASQSISDYLYWYQQKSHESPRLLIKYASQSISGIPARFSGSGSGSEFTLTINSVEPEDVGVYYCQNGHSFPLTFGQGTKLELKR

SEQ ID NO: 39 - protein, 200 aa, Artificial Sequence
  source: /note="Description of Artificial Sequence: Synthetic scFv sequence"
QVQLVQSGAEVVKPGASVKLSCKTSGYTFTNYDINWVRQRPGQGLEWIGWIFPGDGSTQYNEKFKGKATLTTDTSTSTAYMELSSLSSEDTAVYFCARQTTATWFAYWGQGTLVTVSSGGGGSGGGGSGGGGSEIVMTQSPATLSVSPGERVTLSCRASQEISDYLYWYQQKSHESPRLLIKYASQSISGIPARFSGSGS

SEQ ID NO: 40 - protein, 200 aa, Artificial Sequence
  source: /note="Description of Artificial Sequence: Synthetic scFv sequence"
QVQLVQSGAEVVKPGASVKLSCKTSGYTFTNYDINWVRQRPGQGLEWVGWIFPGDGSTQYNEKFKGKATLTTDTSTSTAYMELSSLRSEDTAVYFCARQTTSTWFAYWGQGTLVTVSSGGGGSGGGGSGGGGSEIVMTQSPATLSVSPGERVTLSCRASQEISDYLYWYQQKSHESPRLLIKYASQSISGIPARFSGSGS

SEQ ID NO: 41 - protein, 241 aa, Artificial Sequence
  source: /note="Description of Artificial Sequence: Synthetic scFv sequence"
QVQLVQSGAEVVKPGASVKLSCKTSGYTFTNYDINWVRQRPGQGLEWVGWIFPGDGSTQYNEKFKGKATLTTDTSTSTAYMELSSLRSEDTAVYFCARQTTSTWFAYWGQGTLVTVSSGGGGSGGGGSGGGGSEIVMTQSPATLSVSPGERVTLSCRASQPISDYLYWYQQKSHESPRLLIKYASQSISGIPARFSGSGSGSEFTLTINSVEPEDVGVYYCQNGYSFPLTFGQGTKLELKR

SEQ ID NO: 42 - protein, 241 aa, Artificial Sequence
  source: /note="Description of Artificial Sequence: Synthetic scFv sequence"
QVQLVQSGAEVVKPGASVKVSCKASGYTFTNYDINWVRQRPEQGLEWIGWIFPGDGSTQYNEKFKGRVTMTTDTSTSTVYMELSSLRSEDTAVYFCARQTTATWFAYWGQGTLVTVSSGGGGSGGGGSGGGGSEIVMTQSPATLSVSPGERVTLSCRASQSISDYLHWYQQKSHQAPRLLIKYASQSISGIPARFSGSGSGSEFTLTISSLQPEDFGVYYCQNGHSFPLTFGQGTKLELKR

SEQ ID NO: 43 - protein, 241 aa, Artificial Sequence
  source: /note="Description of Artificial Sequence: Synthetic scFv sequence"
QVQLVQSGAEVVKPGASVKVSCKTSGYTFTNYDINWVRQRPGQGLEWIGWIFPGDDSTQYNEKFKGRVTMTTDTSTSTVYMELSSLRSEDTAVYFCARQTTGTWFAYWGQGTLVTVSSGGGGSGGGGSGGGGSEIVMTQSPATLSVSPGERVTLSCRASQSISDYLYWYQQKSHQAPRLLIKYASQSISGIPARFSGSGSGSEFTLTISSLQPEDFGVYYCQNGHSFPLTFGQGTKLELKR

SEQ ID NO: 44 - protein, 200 aa, Artificial Sequence
  source: /note="Description of Artificial Sequence: Synthetic scFv sequence"
  MOD_RES (3)..(3): Any amino acid
QVXLVQSGAEVVKPGASVKLSCKASGYTFTNYDINWARQRPGQGLEWIGWIFPGDGSTQYNEKFKGKATLTTDTSTGTAYMELSSLRSEDTAVYFCARQTTATWFAYWGQGTVVTVSSGGGGSGGGGSGGGGNEIVMTQSPATLSVSPGERVTLSCRASQSISDYVYWYQQKPHESPRLLIKYASQSISGIPARFSGSGS

SEQ ID NO: 45 - protein, 200 aa, Artificial Sequence
  source: /note="Description of Artificial Sequence: Synthetic scFv sequence"
  MOD_RES (3)..(3): Any amino acid
QVXLVQSGAEVVKPGASVKLSCKTSGYTFTNYDINWVRQRPGQGLEWIGWIFPGDGSTQYNEKFKGKATLTTDTSTSTAYLELSSLGSEDTAVYFCARQTTGTWFAYWGQGTLVTVSSGGGGSGGGGSGGGGSEIVMTQSPATLSVSPGERVTLSCRASQSISDYLYWYQQKSHESPRLLIKYASQSISGIPARFSGSGS

SEQ ID NO: 46 - protein, 200 aa, Artificial Sequence
  source: /note="Description of Artificial Sequence: Synthetic scFv sequence"
  MOD_RES (3)..(3): Any amino acid
QVXLVQSGAEVVKPGASVKLSCKTSGYTFTNYDINWVRQRPGQGLEWIGWIFPGDGSTQYNEKFKGKATLTTDTSTSTAYMELSSLGSEDTAVYFCTRQTTATWFAYWGQGTLVTVSSGGGGSGGGGSSGGGSEIVMTQSPATLSVSPGERVTLSCRASQSIGDYLYWYQQKSHESPRLLIKYASQSISGIPARFSGSGS

SEQ ID NO: 47 - protein, 200 aa, Artificial Sequence
  source: /note="Description of Artificial Sequence: Synthetic scFv sequence"
  MOD_RES (3)..(3): Any amino acid
QVXLVQSGAEVVKPGASVKLSCKTSGYTFTNYDINWVRQRPGQGLEWIGWIFPGDGSTQYNEKFKGKATLTTDTSTSTAYMELSSLRSEDTAVYFCARQTTATWFAYWGQGTLVTVSSGGGGSGGGGSGGVGSEIVMTQSPATLSVSPGERVTLSCRASQSIGDYLYWYQQKSHESPRLLIKYASQSISGIPARFSGSGS

SEQ ID NO: 48 - protein, 200 aa, Artificial Sequence
  source: /note="Description of Artificial Sequence: Synthetic scFv sequence"
  MOD_RES (3)..(3): Any amino acid
  MOD_RES (5)..(5): Any amino acid
QVXLXQSGAEVVKPGASVKLSCKTSGYTFTNYDINWVRQRPGQGLEWIGWIFPGDGSTQYNEKFKGKATLTTDTSTSTAYLELSSLGSEDTAVYFCARQTTGTWFAYWGQGTLVTVSSGGGGSGGGGSGGGGSEIVMTQSPATLSVSPGERVTLSCRASQSISDYLYWYQQKSHESPRLLIKYASQSISGIPARFSGSGS

SEQ ID NO: 49 - protein, 200 aa, Artificial Sequence
  source: /note="Description of Artificial Sequence: Synthetic scFv sequence"
  MOD_RES (3)..(3): Any amino acid
  MOD_RES (5)..(5): Any amino acid
QVXLXQSGAEVVKPGASVKLSCKTSGYTFTNYDINWVRQRPGQGLEWIGWIFPGDGSTQYNEKFKGKATLTTDTSTSTAYMELSSLRSEDTAVYFCARQTTATWFAYWGQGTLVTVSSGGGGSGGGGSGGGGSEIVMTQSPATLSVSPGERVTLSCRASQSISDYLYWYQQKSHESPRLLIKYASQSISGIPARFSGSGS

SEQ ID NO: 50 - protein, 200 aa, Artificial Sequence
  source: /note="Description of Artificial Sequence: Synthetic scFv sequence"
  MOD_RES (3)..(4): Any amino acid
  MOD_RES (18)..(18): Any amino acid
QVXXVQSGAEVVKPGASXKLSCKTSGYTFTNYDINWVRQRPGQGLEWIGWIFPGDGSTQYNEKFKGKATLTTDTSTSTAYMELSSLRSEDTAVYFCARQTTATWFAYWGQGTLVTVSSGGGGSGGGGSGGVGSEIVMTQSPATLSVSPGERVTLSCRASQSIGDYLYWYQQKSHESPRLLIKYASQSISGIPARFSGSGS

SEQ ID NO: 51 - protein, 200 aa, Artificial Sequence
  source: /note="Description of Artificial Sequence: Synthetic scFv sequence"
  MOD_RES (3)..(5): Any amino acid
QVXXXQSGAEVVKPGASVKLSCKTSGYTFTNYDINWVRQRPGQGLEWIGWIFPGDDSTQYNEKFKGKATLTTDTSTSTAYMELSSLRSEDTAVYFCARQTTGTWFAYWGQGTLVTVSSGGGGSGGGGSGGGGSEIVMTQSPATLSVSPGERVTLSCRASQSISDYLYWYQQKSHESPRLLIKYASQSIPGIPARFSGSGS

SEQ ID NO: 52 - protein, 200 aa, Artificial Sequence
  source: /note="Description of Artificial Sequence: Synthetic scFv sequence"
  MOD_RES (3)..(5): Any amino acid
  MOD_RES (170)..(171): Any amino acid
QVXXXQSGAEVVKPGASVKLSCKTSGYTFTNYDINWVRQRPGQGLEWIGWIFPGDGSTQYNEKFKGKATLTTDTSTSTAYLELSSLGSEDTAVYFCARQTTGTWFAYWGQGTLVTVSSGGGGSGGGGSGGGGSEIVMTQSPATLSVSPGERVTLSCRASQSISDYLYWYXXKSHESPRLLIKYASQSISGIPARFSGSGS

SEQ ID NO: 53 - protein, 200 aa, Artificial Sequence
  source: /note="Description of Artificial Sequence: Synthetic scFv sequence"
  MOD_RES (2)..(5): Any amino acid
QXXXXQSGAEVVKPGASVKLSCKTSGYTFTNYDINWVRQRPGQGLEWIGWIFPGDGSTQYNEKFKGKATLTTDTSTSTAYMELSSLRSEDTAVYFCARQTTATWFAYWGQGTLVTVSSGGGGSGGGGSGGVGSEIVMTQSPATLSVSPGERVTLSCRASQSIGDYLYWYQQKSHESPRLLIKYASQSISGIPARFSGSGS

SEQ ID NO: 54 - protein, 200 aa, Artificial Sequence
  source: /note="Description of Artificial Sequence: Synthetic scFv sequence"
  MOD_RES (2)..(6): Any amino acid
  MOD_RES (17)..(19): Any amino acid
QXXXXXSGAEVVKPGAXXXLSCKTSGYTFTNYDINWVRQRPGQGLEWIGWIFPGDGSTQYNEKFKGKATLTTDTSTSTAYLELSSLGSEDTAVYFCARQTTGTWFAYWGQGTLVTVSSGGGGSGGGGSGGGGSEIVMTQSPATLSVSPGERVTLSCRASQSISDYLYWYQQKSHESPRLLIKYASQSISGIPARFSGSGS

SEQ ID NO: 55 - protein, 253 aa, Artificial Sequence
  source: /note="Description of Artificial Sequence: Synthetic scFv sequence"
DIVMTQTPATLSVSPGKRATLSCRASQSVSSNYLAWYQQKPGQAPRLLIYGASRRATGIPDRFSGSGSGTDFTLTISSLQAEDVAVYYCQQYGSSPRTFGQGTKLEIKGGSSRSSSSGGGGSGGGGQVTLKESGAEVKNPGSSVKVSCKASGGTFSSYAISWLRQAPGQGLEWMGWINPNSGGSDYAQRFQGRVTMTRDTSINTVYMELSRLRSDDTAVYYCARVEKRGYYYGMDVWGQGTMVTVSSFEGSEQ

SEQ ID NO: 56 - protein, 255 aa, Artificial Sequence
  source: /note="Description of Artificial Sequence: Synthetic scFv sequence"
QPGLTQPPSASGTPGQRVTISCSGSSSNIGSNYVYWYQQFPGTAPKLLIYRNNQRPSGVPDRFSGSKSGTSASLAISGLRSEDEADYYCAAWDDSLSVWVFGGGTKVTVLGGSSRSSSSGGSGSGGGGQVTLKESGAEVKNPGSSVKVSCKASGGTFSSYAISWLRQAPGQGLEWMGWINPNSGGSDYAQRFQGRVTMTRDTSINTVYMELSRLRSDDTAVYYCARVEKRGYYYGMDVWGQGTMVTVSSFEGSEQ

SEQ ID NO: 57 - protein, 263 aa, Artificial Sequence
  source: /note="Description of Artificial Sequence: Synthetic scFv sequence"
QPVLTQSHSVSESPGKTVTITCTGSGGNIATQYVQWYQQRPGSGPTTVIYDDDQRPSGVPDRFTGSIDSSSNSASLTISGLKTEDEADYYCQSYDSTNHGVFGGGAKVTVLGGSSRSSSSGGGGSGGGGQVQLQQWGPGLVKPSETLSLTCTVSGGSISSSSYYWGWIRQPPGKGLEWIGSIYYSGSTYYNPSLKSRVTISVDTSKNQFSLKLSSVTAADTAVYYCARLSKGYSSSWAYSYYGPDAWGQGTMVTVSSFEGSEQ

SEQ ID NO: 58 - protein, 263 aa, Artificial Sequence
  source: /note="Description of Artificial Sequence: Synthetic scFv sequence"
QPVLTQSHTVTITCTGYVQWYQQRSVSESPGKSGGNIATQPGSGPTTVIYDDDQRPSGVPDRFTGSIDSSSNSASLTISGLKTEDEADYYCQSYDSTNHGVFGGGAKVTVLGGSSRSSSSGGGGSGGGGQVQLQQWGPGLVKPSETLSLTCTVSGGSISSSSYYWGWIRQPPGKGLEWIGSIYYSGSTYYNPSLKSRVTISVDTSKNQFSLKLSSVTAADTAVYYCARLSKGYSSSWAYSYYGPDAWGQGTMVTVSSFEGSEQ

SEQ ID NO: 59 - protein, 254 aa, Artificial Sequence
  source: /note="Description of Artificial Sequence: Synthetic scFv sequence"
RPVLTQPPSAAGTPGQRVTISCSGSSSNIGSNYVYWYQQLPGMAPKLLIYTNNQRPSGVPGRFSGSKSGTSASLAISGLRSEDEADYYCAAWDDSLNGWVFGGGTELTVLGGSSRSSSSGGGGSGGGGQVQLQESGPGLVKPSETLSLTCNVSGRSVSSGFYWSWIRQRPGKGLEWVGSIYRSGLTYYNPSLKSRVTISVDTSKNQFSLKLSSVTAADTAVYYCARATPWYYYGMDVWGQGTTVTVSSFEGSEQ

SEQ ID NO: 60 - protein, 249 aa, Artificial Sequence
  source: /note="Description of Artificial Sequence: Synthetic scFv sequence"
DIQMTQSPSSLSASVGDRVTITCSASQDISNYLNWYQQKPGKAPKLLIYYTSNLHSGVPSRFSGSGSGTDFTLTISSLQPEDFATYYCQQYRKLPWTFGQGTKLEIKRGGGGSGGGGSGGGGSGGGGSQVQLVQSGAEVKKPGSSVKVSCKASGGTFSNYWMHWVRQAPGQGLEWMGATYRGHSDTYYNQKFKGRVTITADKSTSTAYMELSSLRSEDTAVYYCARGAIYNGYDVLDNWGQGTLVTVSS

SEQ ID NO: 61 - protein, 246 aa, Artificial Sequence
  source: /note="Description of Artificial Sequence: Synthetic scFv sequence"
DIVLTQSPASLAMSLGKRATISCRASESVSVIGAHLIHWYQQKPGQPPKLLIYLASNLETGVPARFSGSGSGTDFTLTIDPVEEDDVAIYSCLQSRIFPRTFGGGTKLEIKGSTSGSGKPGSGEGSTKGQIQLVQSGPELKKPGETVKISCKASGYTFTDYSINWVKRAPGKGLKWMGWINTETREPAYAYDFRGRFAFSLETSASTAYLQINNLKYEDTATYFCALDYSYAMDYWGQGTSVTVSS

SEQ ID NO: 62 - DNA, 738 bp, Artificial Sequence
  source: /note="Description of Artificial Sequence: Synthetic scFv sequence"
gacatcgtgctgacacagagccctgcatccctggcaatgtccctgggcaagagggcaaccatctcttgcagggcctctgagagcgtgtccgtgatcggcgcccacctgatccactggtaccagcagaagccaggacagccacctaagctgctgatctatctggcctccaacctggagacaggagtgcctgcacggttctctggcagcggctccggcaccgactttacactgaccatcgatccagtggaggaggacgatgtggccatctactcttgcctgcagagcagaatcttccccaggacatttggcggcggcaccaagctggagatcaagggctctacaagcggctccggcaagcctggctccggagagggctctaccaagggacagatccagctggtgcagtccggacccgagctgaagaagcctggcgagacagtgaagatcagctgtaaggcctccggctacacattcaccgattattctatcaactgggtgaagagggcaccaggcaagggcctgaagtggatgggctggatcaatacagagacacgggagcccgcctacgcctatgacttcagaggcaggttcgcctttagcctggagacatctgccagcaccgcctacctgcagatcaacaatctgaagtacgaggatacagccacctatttttgcgccctggactacagctatgccatggattattggggccagggcacatccgtgaccgtgagctcc

SEQ ID NO: 63 - protein, 238 aa, Artificial Sequence
  source: /note="Description of Artificial Sequence: Synthetic scFv sequence"
EVQLLETGGGLVQPGGSLRLSCAVSGFALSNHGMSWVRRAPGKGLEWVSGIVYSGSTYYAASVKGRFTISRDNSRNTLYLQMNSLRPEDTAIYYCSAHGGESDVWGQGTTVTVSSASGGGGSGGRASGGGGSEIVLTQSPATLSVSPGESATLSCRASQSVSSNLAWYQQKPGQAPRLLIYGASTRASGIPDRFSGSGSGTDFTLTISSLQAEDVAVYYCQQYGSSLTFGGGTKVEIK

SEQ ID NO: 64 - protein, 240 aa, Artificial Sequence
  source: /note="Description of Artificial Sequence: Synthetic scFv sequence"
EVQLVESGGGLVKPGGSLRLSCAASGFTFSDYYMSWIRQAPGKGLEWVSYISSSGSTIYYADSVKGRFTISRDNAKNSLYLQMNSLRAEDTAVYYCARDLRGAFDIWGQGTMVTVSSGGGGSGGGGSGGGGSSYVLTQSPSVSAAPGYTATISCGGNNIGTKSVHWYQQKPGQAPLLVIRDDSVRPSKIPGRFSGSNSGNMATLTISGVQAGDEADFYCQVWDSDSEHVVFGGGTKLTVL

SEQ ID NO: 65 - protein, 241 aa, Artificial Sequence
  source: /note="Description of Artificial Sequence: Synthetic scFv sequence"
EVQLVESGGGLVQPGGSLRLSCAASGFTFSSYAMSWVRQAPGKGLEWVSAISGSGGSTYYADSVKGRFTISRDNSKNTLYLQMNSLRAEDTAVYYCAKVVRDGMDVWGQGTTVTVSSGGGGSGGGGSGGGGSEIVLTQSPATLSLSPGERATLSCRASQSVSSSYLAWYQQKPGQAPRLLIYGASSRATGIPDRFSGNGSGTDFTLTISRLEPEDFAVYYCQQYGSPPRFTFGPGTKVDIK

SEQ ID NO: 66 - protein, 106 aa, Artificial Sequence
  source: /note="Description of Artificial Sequence: Synthetic scFv sequence"
EVQLVESGGGLVQPGGSLRLSCAVSGFALSNHGMSWVRRAPGKGLEWVSGIVYSGSTYYAASVKGRFTISRDNSRNTLYLQMNSLRPEDTAIYYCSAHGGESDVWG

SEQ ID NO: 67 - protein, 239 aa, Artificial Sequence
  source: /note="Description of Artificial Sequence: Synthetic scFv sequence"
EVQLVESGGGLVQPGGSLRLSCAVSGFALSNHGMSWVRRAPGKGLEWVSGIVYSGSTYYAASVKGRFTISRDNSRNTLYLQMNSLRPEDTAIYYCSAHGGESDVWGQGTTVTVSSASGGGGSGGRASGGGGSDIQLTQSPSSLSASVGDRVTITCRASQSISSYLNWYQQKPGKAPKLLIYAASSLQSGVPSRFSGSGSGTDFTLTISSLQPEDFATYYCQQSYSTPYTFGQGTKVEIK

SEQ ID NO: 68 - protein, 241 aa, Artificial Sequence
  source: /note="Description of Artificial Sequence: Synthetic scFv sequence"
EVQLVESGGGLVQPGGSLRLSCAVSGFALSNHGMSWVRRAPGKGLEWVSGIVYSGSTYYAASVKGRFTISRDNSRNTLYLQMNSLRPEDTAIYYCSAHGGESDVWGQGTTVTVSSASGGGGSGGRASGGGGSEIVLTQSPGTLSLSPGERATLSCRASQSIGSSSLAWYQQKPGQAPRLLMYGASSRASGIPDRFSGSGSGTDFTLTISRLEPEDFAVYYCQQYAGSPPFTFGQGTKVEIK

SEQ ID NO: 69 - protein, 238 aa, Artificial Sequence
  source: /note="Description of Artificial Sequence: Synthetic scFv sequence"
EVQLVESGGGLVQPGGSLRLSCAVSGFALSNHGMSWVRRAPGKGLEWVSGIVYSGSTYYAASVKRFTISRDNSRNTLYLQMNSLRPEDTAIYYCSAHGGESDVWGQGTTVTVSSASGGGGSGGRASGGGGSDIQLTQSPSSLSASVGDRVTITCRASQSISSYLNWYQQKPGKAPKLLIYAASSLQSGVPSRFSGSGSGTDFTLTISSLQPEDFATYYCQQSYSTPYTFGQGTKVEIK

SEQ ID NO: 70 - protein, 248 aa, Artificial Sequence
  source: /note="Description of Artificial Sequence: Synthetic scFv sequence"
EVQLVETGGGLVQPGGSLRLSCAASGFTFSSYAMSWVRQAPGKGLEWVSAISGSGGSTYYADSVKGRFTISRDNSKNTLYLQMNTLKAEDTAVYYCARATYKRELRYYYGMDVWGQGTTVTVSSGGGGSGGGGSGGGGSEIVLTQSPSTLSLSPGESATLSCRASQSVSTTFLAWYQQKPGQAPRLLIYGSSNRATGIPDRFSGSGSGTDFTLTIRRLEFEDFAVYYCQQYHSSPSWTFGQGTKVEIK

SEQ ID NO: 71 - protein, 248 aa, Artificial Sequence
  source: /note="Description of Artificial Sequence: Synthetic scFv sequence"
EVQLVETGGGLVQPGGSLRLSCAASGFTFSSYAMSWVRQAPGKGLEWVSAISGSGGSTYYADSVKGRFTMSRENDKNSVFLQMNSLRVEDTGVYYCARANYKRELRYYYGMDVWGQGTMVTVSSGGGGSGGGGSGGGGSEIVMTQSPGTLSLSPGESATLSCRASQRVASNYLAWYQHKPGQAPSLLISGASSRATGVPDRFSGSGSGTDFTLAISRLEPEDSAVYYCQHYDSSPSWTFGQGTKVEIK

SEQ ID NO: 72 - protein, 241 aa, Artificial Sequence
  source: /note="Description of Artificial Sequence: Synthetic scFv sequence"
EVQLVETGGGLVQPGGSLRLSCAASGITFSRYPMSWVRQAPGKGLEWVSGISDSGVSTYYADSAKGRFTISRDNSKNTLFLQMSSLRDEDTAVYYCVTRAGSEASDIWGQGTMVTVSSGGGGSGGGGSGGGGSEIVLTQSPATLSLSPGERATLSCRASQSVSNSLAWYQQKPGQAPRLLIYDASSRATGIPDRFSGSGSGTDFTLTISRLEPEDFAIYYCQQFGTSSGLTFGGGTKLEIK

SEQ ID NO: 73 - protein, 239 aa, Artificial Sequence
  source: /note="Description of Artificial Sequence: Synthetic scFv sequence"
EVQLVETGGGLVQPGGSLRLSCAVSGFALSNHGMSWVRRAPGKGLEWVSGIVYSGSTYYAASVKGRFTISRDNSRNTLYLQMNSLRPEDTAIYYCSAHGGESDVWGQGTTVTVSSASGGGGSGGRASGGGGSEIVMTQSPATLSVSPGERATLSCRASQSVSSKLAWYQQKPGQAPRLLMYGASIRATGIPDRFSGSGSGTEFTLTISSLEPEDFAVYYCQQYGSSSWTFGQGTKVEIK

SEQ ID NO: 74 - protein, 240 aa, Artificial Sequence
  source: /note="Description of Artificial Sequence: Synthetic scFv sequence"
EVQLVETGGGLVQPGGSLRLSCAVSGFALSNHGMSWVRRAPGKGLEWVSGIVYSGSTYYAASVKGRFTISRDNSRNTLYLQMNSLRPEDTAIYYCSAHGGESDVWGQGTTVTVSSASGGGGSGGRASGGGGSETTLTQSPATLSVSPGERATLSCRASQSVGSNLAWYQQKPGQGPRLLIYGASTRATGIPARFSGSGSGTEFTLTISSLQPEDFAVYYCQQYNDWLPVTFGQGTKVEIK

SEQ ID NO: 75 - protein, 238 aa, Artificial Sequence
  source: /note="Description of Artificial Sequence: Synthetic scFv sequence"
EVQLVETGGGLVQPGRSLRLSCAASGFTFDDYAMHWVRQAPGKGLEWVSGISWNSGSIGYADSVGRFTISRDNAKNSLYLQMNSLRDEDTAVYYCARVGKAVPDVWGQGTTVTVSSGGGGSGGGGSGGGGSDIVMTQTPSSLSASVGDRVTITCRASQSISSYLNWYQQKPGKAPKLLIYAASSLQSGVPSRFSGSGSGTDFTLTISSLQPEDFATYYCQQSYSTPYSFGQGTRLEIK

SEQ ID NO: 76 - protein, 239 aa, Artificial Sequence
  source: /note="Description of Artificial Sequence: Synthetic scFv sequence"
EVQLVETGGGLVQPGRSLRLSCAASGFTFDDYAMHWVRQAPGKGLEWVSGISWNSGSIGYADSVKGRFTISRDNAKNSLYLQMNSLRDEDTAVYYCARVGKAVPDVWGQGTTVTVSSGGGGSGGGGSGGGGSDIVMTQTPSSLSASVGDRVTITCRASQSISSYLNWYQQKPGKAPKLLIYAASSLQSGVPSRFSGSGSGTDFTLTISSLQPEDFATYYCQQSYSTPYSFGQGTRLEIK

SEQ ID NO: 77 - protein, 241 aa, Artificial Sequence
  source: /note="Description of Artificial Sequence: Synthetic scFv sequence"
EVQLVETGGGVVQPGGSLRLSCAVSGFALSNHGMSWVRRAPGKGLEWVSGIVYSGSTYYAASVKGRFTISRDNSRNTLYLQMNSLRPEDTAIYYCSAHGGESDVWGQGTTVTVSSASGGGGSGGRASGGGGSEIVLTQSPGTLSLSPGERATLSCRASQSVGSTNLAWYQQKPGQAPRLLIYDASNRATGIPDRFSGGGSGTDFTLTISRLEPEDFAVYYCQQYGSSPPWTFGQGTKVEIK

SEQ ID NO: 78 - protein, 239 aa, Artificial Sequence
  source: /note="Description of Artificial Sequence: Synthetic scFv sequence"
QVQLVESGGGLVKPGGSLRLSCAASGFTFSDYYMSWIRQAPGKGLEWVSYISSSGSTIYYADSVKGRFTISRDNAKNSLYLQMNSLRAEDTAVYYCARESGDGMDVWGQGTTVTVSSASGGGGSGGRASGGGGSDIQMTQSPSSLSASVGDRVTITCRASQSISSYLNWYQQKPGKAPKLLIYAASSLQSGVPSRFSGSGSGTDFTLTISSLQPEDFATYYCQQSYTLAFGQGTKVDIK

SEQ ID NO: 79 - protein, 248 aa, Artificial Sequence
  source: /note="Description of Artificial Sequence: Synthetic scFv sequence"
QVQLVESGGGLVQPGGSLRLSCAASGFTFSSYAMSWVRQAPGKGLEWVSAISGSGGSTYYADSVKGRFTISRDNAKNSLYLQMNSLRAEDTAIYYCARATYKRELRYYYGMDVWGQGTMVTVSSGGGGSGGGGSGGGGSEIVMTQSPGTVSLSPGERATLSCRASQSVSSSFLAWYQQKPGQAPRLLIYGASSRATGIPDRFSGSGSGTDFTLTISRLEFEDSAVYYCQQYHSSPSWTFGQGTRLEIK

SEQ ID NO: 80 - protein, 251 aa, Artificial Sequence
  source: /note="Description of Artificial Sequence: Synthetic scFv sequence"
QVQLVESGGGLVQPGGSLRLSCAASGFTFSSYAMSWVRQAPGKGLEWVSAISGSGGSTYYADSVKGRFTISRDNSKNTLYLQMNSLRAEDTAVYYCAKVGYDSSGYYRDYYGMDVWGQGTTVTVSSGGGGSGGGGSGGGGSEIVLTQSPGTLSLSPGERATLSCRASQSVSSSYLAWYQQKPGQAPRLLIYGTSSRATGISDRFSGSGSGTDFTLTISRLEPEDFAVYYCQHYGNSPPKFTFGPGTKLEIK

SEQ ID NO: 81 - protein, 250 aa, Artificial Sequence
  source: /note="Description of Artificial Sequence: Synthetic scFv sequence"
QVQLVESGGGLVQPGGSLRLSCAASGFTFSSYAMSWVRQAPGKGLEWVSAISGSGGSTYYADSVKGRFTISRDNSKNTLYLQMNSLRAEDTAVYYCAKVGYDSSGYYRDYYGMDVWGQGTTVTVSSGGGGSGGGGSGGGGSEIVLTQSPGTLSLSPGERATLSCRASQSVSSSYLAWYQQKPGQAPRLLIYTSSRATGISDRFSGSGSGTDFTLTISRLEPEDFAVYYCQHYGNSPPKFTFGPGTKLEIK

SEQ ID NO: 82 - protein, 239 aa, Artificial Sequence
  source: /note="Description of Artificial Sequence: Synthetic scFv sequence"
QVQLVESGGGLVQPGGSLRLSCAVSGFALSNHGMSWVRRAPGKGLEWVSGIVYSGSTYYAASVKGRFTISRDNSRNTLYLQMNSLRPEDTAIYYCSAHGGESDVWGQGTTVTVSSASGGGGSGGRASGGGGSDIRLTQSPSPLSASVGDRVTITCQASEDINKFLNWYHQTPGKAPKLLIYDASTLQTGVPSRFSGSGSGTDFTLTINSLQPEDIGTYYCQQYESLPLTFGGGTKVEIK

SEQ ID NO: 83 - protein, 247 aa, Artificial Sequence
  source: /note="Description of Artificial Sequence: Synthetic scFv sequence"
QVQLVQSGAEVKKPGASVKVSCKASGYTFSNYGITWVRQAPGQGLEWMGWISAYNGNTNYAQKFQGRVTMTRNTSISTAYMELSSLRSEDTAVYYCARGPYYYYMDVWGKGTMVTVSSASGGGGSGGRASGGGGSEIVMTQSPLSLPVTPGEPASISCRSSQSLLYSNGYNYVDWYLQKPGQSPQLLIYLGSNRASGVPDRFSGSGSGTDFKLQISRVEAEDVGIYYCMQGRQFPYSFGQGTKVEIK

SEQ ID NO: 84 - protein, 241 aa, Artificial Sequence
  source: /note="Description of Artificial Sequence: Synthetic scFv sequence"
QVQLVQSGAEVKKPGASVKVSCKPSGYTVTSHYIHWVRRAPGQGLEWMGMINPSGGVTAYSQTLQGRVTMTSDTSSSTVYMELSSLRSEDTAMYYCAREGSGSGWYFDFWGRGTLVTVSSGGGGSGGGGSGGGGSSYVLTQPPSVSVSPGQTASITCSGDGLSKKYVSWYQQKAGQSPVVLISRDKERPSGIPDRFSGSNSADTATLTISGTQAMDEADYYCQAWDDTTVVFGGGTKLTVL

SEQ ID NO: 85 - protein, 249 aa, Artificial Sequence
  source: /note="Description of Artificial Sequence: Synthetic scFv sequence"
QVQLVQSGAEVKKPGSSVKVSCKASGGTFSNYWMHWVRQAPGQGLEWMGATYRGHSDTYYNQKFKGRVTITADKSTSTAYMELSSLRSEDTAVYYCARGAIYNGYDVLDNWGQGTLVTVSSGGGGSGGGGSGGGGSGGGGSDIQMTQSPSSLSASVGDRVTITCSASQDISNYLNWYQQKPGKAPKLLIYYTSNLHSGVPSRFSGSGSGTDFTLTISSLQPEDFATYYCQQYRKLPWTFGQGTKLEIKR

SEQ ID NO: 86 - protein, 248 aa, Artificial Sequence
  source: /note="Description of Artificial Sequence: Synthetic scFv sequence"
QVQLVQSGAEVRKTGASVKVSCKASGYIFDNFGINWVRQAPGQGLEWMGWINPKNNNTNYAQKFQGRVTITADESTNTAYMEVSSLRSEDTAVYYCARGPYYYQSYMDVWGQGTMVTVSSASGGGGSGGRASGGGGSDIVMTQTPLSLPVTPGEPASISCRSSQSLLHSNGYNYLNWYLQKPGQSPQLLIYGSKRASGVPDRFSGSGSGTDFTLHITRVGAEDVGVYYCMQALQTPYTFGQGTKLEIK

SEQ ID NO: 87 - protein, 244 aa, Artificial Sequence
  source: /note="Description of Artificial Sequence: Synthetic scFv sequence"
VNLRESGPALVKPTQTLTLTCTFSGFSLRTSGMCVSWIRQPPGKALEWLARIDWDEDKFYSTSLKTRLTISKDTSDNQVVLRMTNMDPADTATYYCARSGAGGTSATAFDIWGPGTMVTVSSGGGGSGGGGSGGGGSDIQMTQSPSSLSASVGDRVTITCRASQDIYNNLAWFQLKPGSAPRSLMYAANKSQSGVPSRFSGSASGTDFTLTISSLQPEDFATYYCQHYYRFPYSFGQGTKLEIK

SEQ ID NO: 88 - DNA, 747 bp, Artificial Sequence
  source: /note="Description of Artificial Sequence: Synthetic scFv sequence"
caagtccaactcgtccagtccggcgcagaagtcagaaaaaccggtgctagcgtgaaagtgtcctgcaaggcctccggctacattttcgataacttcggaatcaactgggtcagacaggccccgggccaggggctggaatggatgggatggatcaaccccaagaacaacaacaccaactacgcacagaagttccagggccgcgtgactatcaccgccgatgaatcgaccaataccgcctacatggaggtgtcctccctgcggtcggaggacactgccgtgtattactgcgcgaggggcccatactactaccaaagctacatggacgtctggggacagggaaccatggtgaccgtgtcatccgcctccggtggtggaggctccggggggcgggcttcaggaggcggaggaagcgatattgtgatgacccagactccgcttagcctgcccgtgactcctggagaaccggcctccatttcctgccggtcctcgcaatcactcctgcattccaacggttacaactacctgaattggtacctccagaagcctggccagtcgccccagttgctgatctatctgggctcgaagcgcgcctccggggtgcctgaccggtttagcggatctgggagcggcacggacttcactctccacatcacccgcgtgggagcggaggacgtgggagtgtactactgtatgcaggcgctgcagactccgtacacattcggacagggcaccaagctggagatcaag

SEQ ID NO: 89 - DNA, 738 bp, Artificial Sequence
  source: /note="Description of Artificial Sequence: Synthetic scFv sequence"
caagtgcaacttcaagaatcaggcggaggactcgtgcagcccggaggatcattgcggctctcgtgcgccgcctcgggcttcaccttctcgagcgacgccatgacctgggtccgccaggccccggggaaggggctggaatgggtgtctgtgatttccggctccgggggaactacgtactacgccgattccgtgaaaggtcgcttcactatctcccgggacaacagcaagaacaccctttatctgcaaatgaattccctccgcgccgaggacaccgccgtgtactactgcgccaagctggactcctcgggctactactatgcccggggtccgagatactggggacagggaaccctcgtgaccgtgtcctccgcgtccggcggaggagggtcgggagggcgggcctccggcggcggcggttcggacatccagctgacccagtccccatcctcactgagcgcaagcgtgggcgacagagtcaccattacatgcagggcgtcccagagcatcagctcctacctgaactggtaccaacagaagcctggaaaggctcctaagctgttgatctacggggcttcgaccctggcatccggggtgcccgcgaggtttagcggaagcggtagcggcactcacttcactctgaccattaacagcctccagtccgaggattcagccacttactactgtcagcagtcctacaagcgggccagcttcggacagggcactaaggtcgagatcaag

SEQ ID NO: 90 - DNA, 741 bp, Artificial Sequence
  source: /note="Description of Artificial Sequence: Synthetic scFv sequence"
caagtccaactggtccagagcggtgcagaagtgaagaagcccggagcgagcgtgaaagtgtcctgcaaggcttccgggtacaccttctccaactacggcatcacttgggtgcgccaggccccgggacagggcctggaatggatggggtggatttccgcgtacaacggcaatacgaactacgctcagaagttccagggtagagtgaccatgactaggaacacctccatttccaccgcctacatggaactgtcctccctgcggagcgaggacaccgccgtgtactattgcgcccggggaccatactactactacatggatgtctgggggaaggggactatggtcaccgtgtcatccgcctcgggaggcggcggatcaggaggacgcgcctctggtggtggaggatcggagatcgtgatgacccagagccctctctccttgcccgtgactcctggggagcccgcatccatttcatgccggagctcccagtcacttctctactccaacggctataactacgtggattggtacctccaaaagccgggccagagcccgcagctgctgatctacctgggctcgaacagggccagcggagtgcctgaccggttctccgggtcgggaagcgggaccgacttcaagctgcaaatctcgagagtggaggccgaggacgtgggaatctactactgtatgcagggccgccagtttccgtactcgttcggacagggcaccaaagtggaaatcaag

SEQ ID NO: 91 - protein, 246 aa, Artificial Sequence
  source: /note="Description of Artificial Sequence: Synthetic scFv sequence"
QVQLVQSGAEVKKPGASVKVSCKASGYTFSNYGITWVRQAPGQGLEWMGWISAYNGNTNYAQKFQGRVTMTRNTSISTAYMELSSLRSEDTAVYYCARGPYYYYMDVWGKGTMVTVSSASGGGGSGGRASGGGGSEIVMTQSPLSLPVTPGEPASISCRSSQSLLYSNGYNYVDWYLQKPGQSPQLLIYLGSNRASGVPDRFSGSGSGTDFKLQISRVEAEDVGIYYCMQGRQFPYSFGQGTKVEI

SEQ ID NO: 92 - DNA, 738 bp, Artificial Sequence
  source: /note="Description of Artificial Sequence: Synthetic scFv sequence"
caagtgcaactcgtggaatctggtggaggactcgtgcaacccggaagatcgcttagactgtcgtgtgccgccagcgggttcactttctcgaactacgcgatgtcctgggtccgccaggcacccggaaagggactcggttgggtgtccggcatttcccggtccggcgaaaatacctactacgccgactccgtgaagggccgcttcaccatctcaagggacaacagcaaaaacaccctgtacttgcaaatgaactccctgcgggatgaagatacagccgtgtactattgcgcccggtcgcctgcccattactacggcggaatggacgtctggggacagggaaccactgtgactgtcagcagcgcgtcgggtggcggcggctcagggggtcgggcctccggggggggagggtccgacatcgtgctgacccagtccccgggaaccctgagcctgagcccgggagagcgcgcgaccctgtcatgccgggcatcccagagcattagctcctcctttctcgcctggtatcagcagaagcccggacaggccccgaggctgctgatctacggcgctagcagaagggctaccggaatcccagaccggttctccggctccggttccgggaccgatttcacccttactatctcgcgcctggaacctgaggactccgccgtctactactgccagcagtaccactcatccccgtcgtggacgttcggacagggcaccaagctggagattaag

SEQ ID NO: 93 - DNA, 714 bp, Artificial Sequence
  source: /note="Description of Artificial Sequence: Synthetic scFv sequence"
gaagtgcaattgctcgaaactggaggaggtctggtgcaacctggaggatcacttcgcctgtcctgcgccgtgtcgggctttgccctgtccaaccatggaatgagctgggtccgccgcgcgccggggaagggcctcgaatgggtgtccggcatcgtctactccggctccacctactacgccgcgtccgtgaagggccggttcacgatttcacgggacaactcgcggaacaccctgtacctccaaatgaattcccttcggccggaggatactgccatctactactgctccgcccacggtggcgaatccgacgtctggggccagggaaccaccgtgaccgtgtccagcgcgtccgggggaggaggaagcgggggtagagcatcgggtggaggcggatcagagatcgtgctgacccagtcccccgccaccttgagcgtgtcaccaggagagtccgccaccctgtcatgccgcgccagccagtccgtgtcctccaacctggcttggtaccagcagaagccggggcaggcccctagactcctgatctatggggcgtcgacccgggcatctggaattcccgataggttcagcggatcgggctcgggcactgacttcactctgaccatctcctcgctgcaagccgaggacgtggctgtgtactactgtcagcagtacggaagctccctgactttcggtggcgggaccaaagtcgagattaag

SEQ ID NO: 94 - DNA, 732 bp, Artificial Sequence
  source: /note="Description of Artificial Sequence: Synthetic scFv sequence"
caagtgcaactcgtcgaatccggtggaggtctggtccaacctggtagaagcctgagactgtcgtgtgcggccagcggattcacctttgatgactatgctatgcactgggtgcggcaggccccaggaaagggcctggaatgggtgtcgggaattagctggaactccgggtccattggctacgccgactccgtgaagggccgcttcaccatctcccgcgacaacgcaaagaactccctgtacttgcaaatgaactcgctcagggctgaggataccgcgctgtactactgctccgtgcattccttcctggcctactggggacagggaactctggtcaccgtgtcgagcgcctccggcggcgggggctcgggtggacgggcctcgggcggaggggggtccgacatcgtgatgacccagaccccgctgagcttgcccgtgactcccggagagcctgcatccatctcctgccggtcatcccagtcccttctccactccaacggatacaactacctcgactggtacctccagaagccgggacagagccctcagcttctgatctacctggggtcaaatagagcctcaggagtgccggatcggttcagcggatctggttcgggaactgatttcactctgaagatttcccgcgtggaagccgaggacgtgggcgtctactactgtatgcaggcgctgcagaccccctataccttcggccaagggacgaaagtggagatcaag

SEQ ID NO: 95 - DNA, 717 bp, Artificial Sequence
  source: /note="Description of Artificial Sequence: Synthetic scFv sequence"
gaagtgcaattggtggaaactggaggaggacttgtgcaacctggaggatcattgagactgagctgcgcagtgtcgggattcgccctgagcaaccatggaatgtcctgggtcagaagggcccctggaaaaggcctcgaatgggtgtcagggatcgtgtactccggttccacttactacgccgcctccgtgaaggggcgcttcactatctcacgggataactcccgcaataccctgtacctccaaatgaacagcctgcggccggaggataccgccatctactactgttccgcccacggtggagagtctgacgtctggggccagggaactaccgtgaccgtgtcctccgcgtccggcggtggagggagcggcggccgcgccagcggcggcggaggctccgagatcgtgatgacccagagccccgctactctgtcggtgtcgcccggagaaagggcgaccctgtcctgccgggcgtcgcagtccgtgagcagcaagctggcttggtaccagcagaagccgggccaggcaccacgcctgcttatgtacggtgcctccattcgggccaccggaatcccggaccggttctcggggtcggggtccggtaccgagttcacactgaccatttcctcgctcgagcccgaggactttgccgtctattactgccagcagtacggctcctcctcatggacgttcggccaggggaccaaggtcgaaatcaag

SEQ ID NO: 96 - DNA, 723 bp, Artificial Sequence
  source: /note="Description of Artificial Sequence: Synthetic scFv sequence"
gaagtgcaattggtggagactggaggaggagtggtgcaacctggaggaagcctgagactgtcatgcgcggtgtcgggcttcgccctctccaaccacggaatgtcctgggtccgccgggcccctgggaaaggacttgaatgggtgtccggcatcgtgtactcgggttccacctactacgcggcctcagtgaagggccggtttactattagccgcgacaactccagaaacacactgtacctccaaatgaactcgctgcggccggaagataccgctatctactactgctccgcccatgggggagagtcggacgtctggggacagggcaccactgtcactgtgtccagcgcttccggcggtggtggaagcgggggacgggcctcaggaggcggtggcagcgagattgtgctgacccagtcccccgggaccctgagcctgtccccgggagaaagggccaccctctcctgtcgggcatcccagtccgtggggtctactaaccttgcatggtaccagcagaagcccggccaggcccctcgcctgctgatctacgacgcgtccaatagagccaccggcatcccggatcgcttcagcggaggcggatcgggcaccgacttcaccctcaccatttcaaggctggaaccggaggacttcgccgtgtactactgccagcagtatggttcgtccccaccctggacgttcggccaggggactaaggtcgagatcaag

SEQ ID NO: 97 - DNA, 717 bp, Artificial Sequence
  source: /note="Description of Artificial Sequence: Synthetic scFv sequence"
caagtgcaactcgtggaatctggtggaggactcgtgaaacctggaggatcattgagactgtcatgcgcggcctcgggattcacgttctccgattactacatgagctggattcgccaggctccggggaagggactggaatgggtgtcctacatttcctcatccggctccaccatctactacgcggactccgtgaaggggagattcaccattagccgcgataacgccaagaacagcctgtaccttcagatgaactccctgcgggctgaagatactgccgtctactactgcgcaagggagagcggagatgggatggacgtctggggacagggtaccactgtgaccgtgtcgtcggcctccggcggagggggttcgggtggaagggccagcggcggcggaggcagcgacatccagatgacccagtccccctcatcgctgtccgcctccgtgggcgaccgcgtcaccatcacatgccgggcctcacagtcgatctcctcctacctcaattggtatcagcagaagcccggaaaggcccctaagcttctgatctacgcagcgtcctccctgcaatccggggtcccatctcggttctccggctcgggcagcggtaccgacttcactctgaccatctcgagcctgcagccggaggacttcgccacttactactgtcagcaaagctacaccctcgcgtttggccagggcaccaaagtggacatcaag

SEQ ID NO: 98 - DNA, 738 bp, Artificial Sequence
  source: /note="Description of Artificial Sequence: Synthetic scFv sequence"
caagtgcaactggtgcaaagcggaggaggattggtcaaacccggaggaagcctgagactgtcatgcgcggcctctggattcaccttctccgattactacatgtcatggatcagacaggccccggggaagggcctcgaatgggtgtcctacatctcgtcctccgggaacaccatctactacgccgacagcgtgaagggccgctttaccatttcccgcgacaacgcaaagaactcgctgtaccttcagatgaattccctgcgggctgaagataccgcggtgtactattgcgcccggtccactatggtccgggaggactactggggacagggcacactcgtgaccgtgtccagcgcgagcgggggtggaggcagcggtggacgcgcctccggcggcggcggttcagacatcgtgctgactcagtcgcccctgtcgctgccggtcaccctgggccaaccggcctcaattagctgcaagtcctcggagagcctggtgcacaactcaggaaagacttacctgaactggttccatcagcggcctggacagtccccacggaggctcatctatgaagtgtccaacagggattcgggggtgcccgaccgcttcactggctccgggtccggcaccgacttcaccttgaaaatctccagagtggaagccgaggacgtgggcgtgtactactgtatgcagggtacccactggcctggaacctttggacaaggaactaagctcgagattaag

SEQ ID NO: 99 - DNA, 729 bp, Artificial Sequence
  source: /note="Description of Artificial Sequence: Synthetic scFv sequence"
gaagtgcaattgttggaatctggaggaggacttgtgcagcctggaggatcactgagactttcgtgtgcggtgtcaggcttcgccctgagcaaccacggcatgagctgggtgcggagagccccggggaagggtctggaatgggtgtccgggatcgtctactccggttcaacttactacgccgcaagcgtgaagggtcgcttcaccatttcccgcgataactcccggaacaccctgtacctccaaatgaactccctgcggcccgaggacaccgccatctactactgttccgcgcatggaggagagtccgatgtctggggacagggcactaccgtgaccgtgtcgagcgcctcggggggaggaggctccggcggtcgcgcctccggggggggtggcagcgacattgtgatgacgcagactccactctcgctgtccgtgaccccgggacagcccgcgtccatctcgtgcaagagctcccagagcctgctgaggaacgacggaaagactcctctgtattggtacctccagaaggctggacagcccccgcaactgctcatctacgaagtgtcaaatcgcttctccggggtgccggatcggttttccggctcgggatcgggcaccgacttcaccctgaaaatctccagggtcgaggccgaggacgtgggagcctactactgcatgcaaaacatccagttcccttccttcggcggcggcacaaagctggagattaag

SEQ ID NO: 100 - DNA, 717 bp, Artificial Sequence
  source: /note="Description of Artificial Sequence: Synthetic scFv sequence"
caagtgcaactcgtggaatctggtggaggactcgtgcaacccggtggaagccttaggctgtcgtgcgccgtcagcgggtttgctctgagcaaccatggaatgtcctgggtccgccgggcaccgggaaaagggctggaatgggtgtccggcatcgtgtacagcgggtcaacctattacgccgcgtccgtgaagggcagattcactatctcaagagacaacagccggaacaccctgtacttgcaaatgaattccctgcgccccgaggacaccgccatctactactgctccgcccacggaggagagtcggacgtgtggggccagggaacgactgtgactgtgtccagcgcatcaggagggggtggttcgggcggccgggcctcggggggaggaggttccgacattcggctgacccagtccccgtccccactgtcggcctccgtcggcgaccgcgtgaccatcacttgtcaggcgtccgaggacattaacaagttcctgaactggtaccaccagacccctggaaaggcccccaagctgctgatctacgatgcctcgacccttcaaactggagtgcctagccggttctccgggtccggctccggcactgatttcactctgaccatcaactcattgcagccggaagatatcgggacctactattgccagcagtacgaatccctcccgctcacattcggcgggggaaccaaggtcgagattaag

SEQ ID NO: 101 - DNA, 720 bp, Artificial Sequence
  source: /note="Description of Artificial Sequence: Synthetic scFv sequence"
gaagtgcaattggtggaaactggaggaggacttgtgcaacctggaggatcattgcggctctcatgcgctgtctccggcttcgccctgtcaaatcacgggatgtcgtgggtcagacgggccccgggaaagggtctggaatgggtgtcggggattgtgtacagcggctccacctactacgccgcttcggtcaagggccgcttcactatttcacgggacaacagccgcaacaccctctatctgcaaatgaactctctccgcccggaggataccgccatctactactgctccgcacacggcggcgaatccgacgtgtggggacagggaaccactgtcaccgtgtcgtccgcatccggtggcggaggatcgggtggccgggcctccgggggcggcggcagcgagactaccctgacccagtcccctgccactctgtccgtgagcccgggagagagagccacccttagctgccgggccagccagagcgtgggctccaacctggcctggtaccagcagaagccaggacagggtcccaggctgctgatctacggagcctccactcgcgcgaccggcatccccgcgaggttctccgggtcgggttccgggaccgagttcaccctgaccatctcctccctccaaccggaggacttcgcggtgtactactgtcagcagtacaacgattggctgcccgtgacatttggacaggggacgaaggtggaaatcaaa

SEQ ID NO: 102 - DNA, 723 bp, Artificial Sequence
  source: /note="Description of Artificial Sequence: Synthetic scFv sequence"
gaagtgcaattggtggaatctggtggaggacttgtgcaacctggaggatcactgagactgtcatgcgcggtgtccggttttgccctgagcaatcatgggatgtcgtgggtccggcgcgcccccggaaagggtctggaatgggtgtcgggtatcgtctactccgggagcacttactacgccgcgagcgtgaagggccgcttcaccatttcccgcgataactcccgcaacaccctgtacttgcaaatgaactcgctccggcctgaggacactgccatctactactgctccgcacacggaggagaatccgacgtgtggggccagggaactaccgtgaccgtcagcagcgcctccggcggcgggggctcaggcggacgggctagcggcggcggtggctccgagatcgtgctgacccagtcgcctggcactctctcgctgagccccggggaaagggcaaccctgtcctgtcgggccagccagtccattggatcatcctccctcgcctggtatcagcagaaaccgggacaggctccgcggctgcttatgtatggggccagctcaagagcctccggcattcccgaccggttctccgggtccggttccggcaccgatttcaccctgactatctcgaggctggagccagaggacttcgccgtgtactactgccagcagtacgcggggtccccgccgttcacgttcggacagggaaccaaggtcgagatcaag

SEQ ID NO: 103 - DNA, 729 bp, Artificial Sequence
  source: /note="Description of Artificial Sequence: Synthetic scFv sequence"
caagtgcagcttcaggaaagcggaccgggcctggtcaagccatccgaaactctctccctgacttgcactgtgtctggcggttccatctcatcgtcgtactactactggggctggattaggcagccgcccggaaagggactggagtggatcggaagcatctactattccggctcggcgtactacaaccctagcctcaagtcgagagtgaccatctccgtggatacctccaagaaccagttttccctgcgcctgagctccgtgaccgccgctgacaccgccgtgtactactgtgctcggcattggcaggaatggcccgatgccttcgacatttggggccagggcactatggtcactgtgtcatccgggggtggaggcagcgggggaggagggtccggggggggaggttcagagacaaccttgacccagtcacccgcattcatgtccgccactccgggagacaaggtcatcatctcgtgcaaagcgtcccaggatatcgacgatgccatgaattggtaccagcagaagcctggcgaagcgccgctgttcattatccaatccgcaacctcgcccgtgcctggaatcccaccgcggttcagcggcagcggtttcggaaccgacttttccctgaccattaacaacattgagtccgaggacgccgcctactacttctgcctgcaacacgacaacttccctctcacgttcggccagggaaccaagctggaaatcaag

SEQ ID NO: 104 - DNA, 735 bp, Artificial Sequence
  source: /note="Description of Artificial Sequence: Synthetic scFv sequence"
caagtcaatctgcgcgaatccggccccgccttggtcaagcctacccagaccctcactctgacctgtactttctccggcttctccctgcggacttccgggatgtgcgtgtcctggatcagacagcctccgggaaaggccctggagtggctcgctcgcattgactgggatgaggacaagttctactccacctcactcaagaccaggctgaccatcagcaaagatacctctgacaaccaagtggtgctccgcatgaccaacatggacccagccgacactgccacttactactgcgcgaggagcggagcgggcggaacctccgccaccgccttcgatatttggggcccgggtaccatggtcaccgtgtcaagcggaggaggggggtccgggggcggcggttccgggggaggcggatcggacattcagatgactcagtcaccatcgtccctgagcgctagcgtgggcgacagagtgacaatcacttgccgggcatcccaggacatctataacaaccttgcgtggttccagctgaagcctggttccgcaccgcggtcacttatgtacgccgccaacaagagccagtcgggagtgccgtcccggttttccggttcggcctcgggaactgacttcaccctgacgatctccagcctgcaacccgaggatttcgccacctactactgccagcactactaccgctttccctactcgttcggacagggaaccaagctggaaatcaag

SEQ ID NO: 105 - protein, 245 aa, Artificial Sequence
  source: /note="Description of Artificial Sequence: Synthetic scFv sequence"
QVNLRESGPALVKPTQTLTLTCTFSGFSLRTSGMCVSWIRQPPGKALEWLARIDWDEDKFYSTSLKTRLTISKDTSDNQVVLRMTNMDPADTATYYCARSGAGGTSATAFDIWGPGTMVTVSSGGGGSGGGGSGGGGSDIQMTQSPSSLSASVGDRVTITCRASQDIYNNLAWFQLKPGSAPRSLMYAANKSQSGVPSRFSGSASGTDFTLTISSLQPEDFATYYCQHYYRFPYSFGQGTKLEIK

SEQ ID NO: 106 - DNA, 738 bp, Artificial Sequence
  source: /note="Description of Artificial Sequence: Synthetic scFv sequence"
gaagtgcagcttgtcgaatccggggggggactggtcaagccgggcggatcactgagactgtcctgcgccgcgagcggcttcacgttctcctcctactccatgaactgggtccgccaagcccccgggaagggactggaatgggtgtcctctatctcctcgtcgtcgtcctacatctactacgccgactccgtgaagggaagattcaccatttcccgcgacaacgcaaagaactcactgtacttgcaaatgaactcactccgggccgaagatactgctgtgtactattgcgccaagactattgccgccgtctacgctttcgacatctggggccagggaaccaccgtgactgtgtcgtccggtggtggtggctcgggcggaggaggaagcggcggcggggggtccgagattgtgctgacccagtcgccactgagcctccctgtgacccccgaggaacccgccagcatcagctgccggtccagccagtccctgctccactccaacggatacaattacctcgattggtaccttcagaagcctggacaaagcccgcagctgctcatctacttgggatcaaaccgcgcgtcaggagtgcctgaccggttctccggctcgggcagcggtaccgatttcaccctgaaaatctccagggtggaggcagaggacgtgggagtgtattactgtatgcaggcgctgcagactccgtacacatttgggcagggcaccaagctggagatcaag

SEQ ID NO: 107 - DNA, 720 bp, Artificial Sequence
  source: /note="Description of Artificial Sequence: Synthetic scFv sequence"
gaagtccagctcgtggagtccggcggaggccttgtgaagcctggaggttcgctgagactgtcctgcgccgcctccggcttcaccttctccgactactacatgtcctggatcagacaggccccgggaaagggcctggaatgggtgtcctacatctcgtcatcgggcagcactatctactacgcggactcagtgaaggggcggttcaccatttcccgggataacgcgaagaactcgctgtatctgcaaatgaactcactgagggccgaggacaccgccgtgtactactgcgcccgcgatctccgcggggcatttgacatctggggacagggaaccatggtcacagtgtccagcggagggggaggatcgggtggcggaggttccgggggtggaggctcctcctacgtgctgactcagagcccaagcgtcagcgctgcgcccggttacacggcaaccatctcctgtggcggaaacaacattgggaccaagtctgtgcactggtatcagcagaagccgggccaagctcccctgttggtgatccgcgatgactccgtgcggcctagcaaaattccgggacggttctccggctccaacagcggcaatatggccactctcaccatctcgggagtgcaggccggagatgaagccgacttctactgccaagtctgggactcagactccgagcatgtggtgttcgggggcggaaccaagctgactgtgctc

SEQ ID NO: 108 - DNA, 723 bp, Artificial Sequence
  source: /note="Description of Artificial Sequence: Synthetic scFv sequence"
caagtgcagctggtgcagagcggggccgaagtcaagaagccgggagcctccgtgaaagtgtcctgcaagccttcgggatacaccgtgacctcccactacattcattgggtccgccgcgcccccggccaaggactcgagtggatgggcatgatcaaccctagcggcggagtgaccgcgtacagccagacgctgcagggacgcgtgactatgacctcggatacctcctcctccaccgtctatatggaactgtccagcctgcggtccgaggataccgccatgtactactgcgcccgggaaggatcaggctccgggtggtatttcgacttctggggaagaggcaccctcgtgactgtgtcatctgggggagggggttccggtggtggcggatcgggaggaggcggttcatcctacgtgctgacccagccaccctccgtgtccgtgagccccggccagactgcatcgattacatgtagcggcgacggcctctccaagaaatacgtgtcgtggtaccagcagaaggccggacagagcccggtggtgctgatctcaagagataaggagcggcctagcggaatcccggacaggttctcgggttccaactccgcggacactgctactctgaccatctcggggacccaggctatggacgaagccgattactactgccaagcctgggacgacactactgtcgtgtttggagggggcaccaagttgaccgtcctt

SEQ ID NO: 109 - DNA, 735 bp, Artificial Sequence
  source: /note="Description of Artificial Sequence: Synthetic scFv sequence"
caagtgcagcttcaggagagcggcccgggactcgtgaagccgtcccagaccctgtccctgacttgcaccgtgtcgggaggaagcatctcgagcggaggctactattggtcgtggattcggcagcaccctggaaagggcctggaatggatcggctacatctactactccggctcgacctactacaacccatcgctgaagtccagagtgacaatctcagtggacacgtccaagaatcagttcagcctgaagctctcttccgtgactgcggccgacaccgccgtgtactactgcgcacgcgctggaattgccgcccggctgaggggtgccttcgacatttggggacagggcaccatggtcaccgtgtcctccggcggcggaggttccgggggtggaggctcaggaggaggggggtccgacatcgtcatgactcagtcgccctcaagcgtcagcgcgtccgtcggggacagagtgatcatcacctgtcgggcgtcccagggaattcgcaactggctggcctggtatcagcagaagcccggaaaggcccccaacctgttgatctacgccgcctcaaacctccaatccggggtgccgagccgcttcagcggctccggttcgggtgccgatttcactctgaccatctcctccctgcaacctgaagatgtggctacctactactgccaaaagtacaactccgcaccttttactttcggaccggggaccaaagtggacattaag

SEQ ID NO: 110 - DNA, 759 bp, Artificial Sequence
  source: /note="Description of Artificial Sequence: Synthetic scFv sequence"
caagtgcagctggtccagtcgggcgccgaggtcaagaagcccgggagctctgtgaaagtgtcctgcaaggcctccgggggcacctttagctcctacgccatctcctgggtccgccaagcaccgggtcaaggcctggagtggatggggggaattatccctatcttcggcactgccaactacgcccagaagttccagggacgcgtgaccattaccgcggacgaatccacctccaccgcttatatggagctgtccagcttgcgctcggaagataccgccgtgtactactgcgcccggaggggtggataccagctgctgagatgggacgtgggcctcctgcggtcggcgttcgacatctggggccagggcactatggtcactgtgtccagcggaggaggcggatcgggaggcggcggatcagggggaggcggttccagctacgtgcttactcaacccccttcggtgtccgtggccccgggacagaccgccagaatcacttgcggaggaaacaacattgggtccaagagcgtgcattggtaccagcagaagccaggacaggcccctgtgctggtgctctacgggaagaacaatcggcccagcggagtgccggacaggttctcgggttcacgctccggtacaaccgcttcactgactatcaccggggcccaggcagaggatgaagcggactactactgttcctcccgggattcatccggcgaccacctccgggtgttcggaaccggaacgaaggtcaccgtgctg

SEQ ID NO: 111 - DNA, 744 bp, Artificial Sequence
  source: /note="Description of Artificial Sequence: Synthetic scFv sequence"
gaagtgcagctccaacagtcaggaccggggctcgtgaagccatcccagaccctgtccctgacttgtgccatctcgggagatagcgtgtcatcgaactccgccgcctggaactggattcggcagagcccgtcccgcggactggagtggcttggaaggacctactaccggtccaagtggtactctttctacgcgatctcgctgaagtcccgcattatcattaaccctgatacctccaagaatcagttctccctccaactgaaatccgtcacccccgaggacacagcagtgtattactgcgcacggagcagccccgaaggactgttcctgtattggtttgacccctggggccaggggactcttgtgaccgtgtcgagcggcggagatgggtccggtggcggtggttcggggggcggcggatcatcatccgaactgacccaggacccggctgtgtccgtggcgctgggacaaaccatccgcattacgtgccagggagactccctgggcaactactacgccacttggtaccagcagaagccgggccaagcccctgtgttggtcatctacgggaccaacaacagaccttccggcatccccgaccggttcagcgcttcgtcctccggcaacactgccagcctgaccatcactggagcgcaggccgaagatgaggccgactactactgcaacagcagagactcctcgggtcatcacctcttgttcggaactggaaccaaggtcaccgtgctg

SEQ ID NO: 112 - DNA, 744 bp, Artificial Sequence
  source: /note="Description of Artificial Sequence: Synthetic scFv sequence"
gaagtgcaactggtggaaaccggtggaggactcgtgcagcctggcggcagcctccggctgagctgcgccgcttcgggattcaccttttcctcctacgcgatgtcttgggtcagacaggcccccggaaaggggctggaatgggtgtcagccatctccggctccggcggatcaacgtactacgccgactccgtgaaaggccggttcaccatgtcgcgcgagaatgacaagaactccgtgttcctgcaaatgaactccctgagggtggaggacaccggagtgtactattgtgcgcgcgccaactacaagagagagctgcggtactactacggaatggacgtctggggacagggaactatggtgaccgtgtcatccggtggagggggaagcggcggtggaggcagcgggggcgggggttcagaaattgtcatgacccagtccccgggaactctttccctctcccccggggaatccgcgactttgtcctgccgggccagccagcgcgtggcctcgaactacctcgcatggtaccagcataagccaggccaagccccttccctgctgatttccggggctagcagccgcgccactggcgtgccggataggttctcgggaagcggctcgggtaccgatttcaccctggcaatctcgcggctggaaccggaggattcggccgtgtactactgccagcactatgactcatccccctcctggacattcggacagggcaccaaggtcgagatcaag

SEQ ID NO: 113 - DNA, 738 bp, Artificial Sequence
  source: /note="Description of Artificial Sequence: Synthetic scFv sequence"
gaagtgcagctcgtggagtcaggaggcggcctggtccagccgggagggtcccttagactgtcatgcgccgcaagcggattcactttctcctcctatgccatgagctgggtccgccaagcccccggaaagggactggaatgggtgtccgccatctcggggtctggaggctcaacttactacgctgactccgtgaagggacggttcaccattagccgcgacaactccaagaacaccctctacctccaaatgaactccctgcgggccgaggataccgccgtctactactgcgccaaagtggaaggttcaggatcgctggactactggggacagggtactctcgtgaccgtgtcatcgggcggaggaggttccggcggtggcggctccggcggcggagggtcggagatcgtgatgacccagagccctggtactctgagcctttcgccgggagaaagggccaccctgtcctgccgcgcttcccaatccgtgtcctccgcgtacttggcgtggtaccagcagaagccgggacagccccctcggctgctgatcagcggggccagcacccgggcaaccggaatcccagacagattcgggggttccggcagcggcacagatttcaccctgactatttcgaggttggagcccgaggactttgcggtgtattactgtcagcactacgggtcgtcctttaatggctccagcctgttcacgttcggacaggggacccgcctggaaatcaag

SEQ ID NO: 114 - DNA, 744 bp, Artificial Sequence
  source: /note="Description of Artificial Sequence: Synthetic scFv sequence"
gaggtgcagcttgtggaaaccggtggcggactggtgcagcccggaggaagcctcaggctgtcctgcgccgcgtccggcttcaccttctcctcgtacgccatgtcctgggtccgccaggcccccggaaagggcctggaatgggtgtccgccatctctggaagcggaggttccacgtactacgcggacagcgtcaagggaaggttcacaatctcccgcgataattcgaagaacactctgtaccttcaaatgaacaccctgaaggccgaggacactgctgtgtactactgcgcacgggccacctacaagagagagctccggtactactacggaatggacgtctggggccagggaactactgtgaccgtgtcctcgggagggggtggctccggggggggcggctccggcggaggcggttccgagattgtgctgacccagtcaccttcaactctgtcgctgtccccgggagagagcgctactctgagctgccgggccagccagtccgtgtccaccaccttcctcgcctggtatcagcagaagccggggcaggcaccacggctcttgatctacgggtcaagcaacagagcgaccggaattcctgaccgcttctcggggagcggttcaggcaccgacttcaccctgactatccggcgcctggaacccgaagatttcgccgtgtattactgtcaacagtaccactcctcgccgtcctggacctttggccaaggaaccaaagtggaaatcaag

SEQ ID NO: 115 - DNA, 717 bp, Artificial Sequence
  source: /note="Description of Artificial Sequence: Synthetic scFv sequence"
gaagtgcagctcgtggaaactggaggtggactcgtgcagcctggacggtcgctgcggctgagctgcgctgcatccggcttcaccttcgacgattatgccatgcactgggtcagacaggcgccagggaagggacttgagtgggtgtccggtatcagctggaatagcggctcaatcggatacgcggactccgtgaagggaaggttcaccatttcccgcgacaacgccaagaactccctgtacttgcaaatgaacagcctccgggatgaggacactgccgtgtactactgcgcccgcgtcggaaaagctgtgcccgacgtctggggccagggaaccactgtgaccgtgtccagcggcgggggtggatcgggcggtggagggtccggtggagggggctcagatattgtgatgacccagaccccctcgtccctgtccgcctcggtcggcgaccgcgtgactatcacatgtagagcctcgcagagcatctccagctacctgaactggtatcagcagaagccggggaaggccccgaagctcctgatctacgcggcatcatcactgcaatcgggagtgccgagccggttttccgggtccggctccggcaccgacttcacgctgaccatttcttccctgcaacccgaggacttcgccacttactactgccagcagtcctactccaccccttactccttcggccaaggaaccaggctggaaatcaag

SEQ ID NO: 116 - DNA, 732 bp, Artificial Sequence
  source: /note="Description of Artificial Sequence: Synthetic scFv sequence"
gaagtgcagctgctcgaaaccggtggagggctggtgcagccagggggctccctgaggctttcatgcgccgctagcggattctccttctcctcttacgccatgtcgtgggtccgccaagcccctggaaaaggcctggaatgggtgtccgcgatttccgggagcggaggttcgacctattacgccgactccgtgaagggccgctttaccatctcccgggataactccaagaacactctgtacctccaaatgaactcgctgagagccgaggacaccgccgtgtattactgcgcgaaggcgctggtcggcgcgactggggcattcgacatctggggacagggaactcttgtgaccgtgtcgagcggaggcggcggctccggcggaggagggagcgggggcggtggttccgaaatcgtgttgactcagtccccgggaaccctgagcttgtcacccggggagcgggccactctctcctgtcgcgcctcccaatcgctctcatccaatttcctggcctggtaccagcagaagcccggacaggccccgggcctgctcatctacggcgcttcaaactgggcaacgggaacccctgatcggttcagcggaagcggatcgggtactgactttaccctgaccatcaccagactggaaccggaggacttcgccgtgtactactgccagtactacggcacctcccccatgtacacattcggacagggtaccaaggtcgagattaag

SEQ ID NO: 117 - DNA, 723 bp, Artificial Sequence
  source: /note="Description of Artificial Sequence: Synthetic scFv sequence"
gaagtgcaactggtggaaaccggtggcggcctggtgcagcctggaggatcattgaggctgtcatgcgcggccagcggtattaccttctcccggtaccccatgtcctgggtcagacaggccccggggaaagggcttgaatgggtgtccgggatctcggactccggtgtcagcacttactacgccgactccgccaagggacgcttcaccatttcccgggacaactcgaagaacaccctgttcctccaaatgagctccctccgggacgaggatactgcagtgtactactgcgtgacccgcgccgggtccgaggcgtctgacatttggggacagggcactatggtcaccgtgtcgtccggcggagggggctcgggaggcggtggcagcggaggaggagggtccgagatcgtgctgacccaatccccggccaccctctcgctgagccctggagaaagggcaaccttgtcctgtcgcgcgagccagtccgtgagcaactccctggcctggtaccagcagaagcccggacaggctccgagacttctgatctacgacgcttcgagccgggccactggaatccccgaccgcttttcggggtccggctcaggaaccgatttcaccctgacaatctcacggctggagccagaggatttcgccatctattactgccagcagttcggtacttcctccggcctgactttcggaggcggcacgaagctcgaaatcaag

SEQ ID NO: 118 - DNA, 739 bp, Artificial Sequence
  source: /note="Description of Artificial Sequence: Synthetic scFv sequence"
gaagtccaactggtggagtccgggggagggctcgtgcagcccggaggcagccttcggctgtcgtgcgccgcctccgggttcacgttctcatcctacgcgatgtcgtgggtcagacaggcaccaggaaagggactggaatgggtgtccgccattagcggctccggcggtagcacctactatgccgactcagtgaagggaaggttcactatctcccgcgacaacagcaagaacaccctgtacctccaaatgaactctctgcgggccgaggataccgcggtgtactattgcgccaagatgggttggtccagcggatacttgggagccttcgacatttggggacagggcactactgtgaccgtgtcctccgggggtggcggatcgggaggcggcggctcgggtggagggggttccgaaatcgtgttgacccagtcaccgggaaccctctcgctgtccccgggagaacgggctacactgtcatgtagagcgtcccagtccgtggcttcctcgttcctggcctggtaccagcagaagccgggacaggcaccccgcctgctcatctacggagccagcggccgggcgaccggcatccctgaccgcttctccggttccggctcgggcaccgactttactctgaccattagcaggcttgagcccgaggattttgccgtgtactactgccaacactacggggggagccctcgcctgaccttcggaggcggaactaaggtcgatatcaaaa

SEQ ID NO: 119 - DNA, 744 bp, Artificial Sequence
  source: /note="Description of Artificial Sequence: Synthetic scFv sequence"
caagtgcagctcgtggaatcgggtggcggactggtgcagccggggggctcacttagactgtcctgcgcggccagcggattcactttctcctcctacgccatgtcctgggtcagacaggcccctggaaagggcctggaatgggtgtccgcaatcagcggcagcggcggctcgacctattacgcggattcagtgaagggcagattcaccatttcccgggacaacgccaagaactccttgtaccttcaaatgaactccctccgcgcggaagataccgcaatctactactgcgctcgggccacttacaagagggaactgcgctactactacgggatggacgtctggggccagggaaccatggtcaccgtgtccagcggaggaggaggatcgggaggaggcggtagcgggggtggagggtcggagatcgtgatgacccagtcccccggcactgtgtcgctgtcccccggcgaacgggccaccctgtcatgtcgggccagccagtcagtgtcgtcaagcttcctcgcctggtaccagcagaaaccgggacaagctccccgcctgctgatctacggagccagcagccgggccaccggtattcctgaccggttctccggttcggggtccgggaccgactttactctgactatctctcgcctcgagccagaggactccgccgtgtattactgccagcagtaccactcctccccgtcctggacgttcggacagggcacaaggctggagattaag

SEQ ID NO: 120 - DNA, 738 bp, Artificial Sequence
  source: /note="Description of Artificial Sequence: Synthetic scFv sequence"
gaagtgcagctcgtggagagcgggggaggattggtgcagcccggaaggtccctgcggctctcctgcactgcgtctggcttcaccttcgacgactacgcgatgcactgggtcagacagcgcccgggaaagggcctggaatgggtcgcctcaatcaactggaagggaaactccctggcctatggcgacagcgtgaagggccgcttcgccatttcgcgcgacaacgccaagaacaccgtgtttctgcaaatgaattccctgcggaccgaggataccgctgtgtactactgcgccagccaccagggcgtggcatactataactacgccatggacgtgtggggaagagggacgctcgtcaccgtgtcctccgggggcggtggatcgggtggaggaggaagcggtggcgggggcagcgaaatcgtgctgactcagagcccgggaactctttcactgtccccgggagaacgggccactctctcgtgccgggccacccagtccatcggctcctccttccttgcctggtaccagcagaggccaggacaggcgccccgcctgctgatctacggtgcttcccaacgcgccactggcattcctgaccggttcagcggcagagggtcgggaaccgatttcacactgaccatttcccgggtggagcccgaagattcggcagtctactactgtcagcattacgagtcctccccttcatggaccttcggtcaagggaccaaagtggagatcaag

SEQ ID NO: 121 - DNA, 733 bp, Artificial Sequence
  source: /note="Description of Artificial Sequence: Synthetic scFv sequence"
gaagtgcagctgcttgagagcggtggaggtctggtgcagcccgggggatcactgcgcctgtcctgtgccgcgtccggtttcactttctcctcgtacgccatgtcgtgggtcagacaggcaccgggaaagggactggaatgggtgtcagccatttcgggttcggggggcagcacctactacgctgactccgtgaagggccggttcaccatttcccgcgacaactccaagaacaccttgtacctccaaatgaactccctgcgggccgaagataccgccgtgtattactgcgtgctgtggttcggagagggattcgacccgtggggacaaggaacactcgtgactgtgtcatccggcggaggcggcagcggtggcggcggttccggcggcggcggatctgacatcgtgttgacccagtcccctctgagcctgccggtcactcctggcgaaccagccagcatctcctgccggtcgagccagtccctcctgcactccaatgggtacaactacctcgattggtatctgcaaaagccgggccagagcccccagctgctgatctaccttgggtcaaaccgcgcttccggggtgcctgatagattctccgggtccgggagcggaaccgactttaccctgaaaatctcgagggtggaggccgaggacgtcggagtgtactactgcatgcaggcgctccagactcccctgaccttcggaggaggaacgaaggtcgacatcaaga

SEQ ID NO: 122 - DNA, 726 bp, Artificial Sequence
  source: /note="Description of Artificial Sequence: Synthetic scFv sequence"
gaagtgcagctgctggagtccggcggtggattggtgcaaccggggggatcgctcagactgtcctgtgcggcgtcaggcttcaccttctcgagctacgccatgtcatgggtcagacaggcccctggaaagggtctggaatgggtgtccgccatttccgggagcgggggatctacatactacgccgatagcgtgaagggccgcttcaccatttcccgggacaactccaagaacactctctatctgcaaatgaactccctccgcgctgaggacactgccgtgtactactgcgccaaaatccctcagaccggcaccttcgactactggggacaggggactctggtcaccgtcagcagcggtggcggaggttcggggggaggaggaagcggcggcggagggtccgagattgtgctgacccagtcacccggcactttgtccctgtcgcctggagaaagggccaccctttcctgccgggcatcccaatccgtgtcctcctcgtacctggcctggtaccagcagaggcccggacaggccccacggcttctgatctacggagcaagcagccgcgcgaccggtatcccggaccggttttcgggctcgggctcaggaactgacttcaccctcaccatctcccgcctggaacccgaagatttcgctgtgtattactgccagcactacggcagctccccgtcctggacgttcggccagggaactcggctggagatcaag

SEQ ID NO: 123 - DNA, 723 bp, Artificial Sequence
  source: /note="Description of Artificial Sequence: Synthetic scFv sequence"
gaggtgcagttggtcgaaagcgggggcgggcttgtgcagcctggcggatcactgcggctgtcctgcgcggcatcaggcttcacgttttcttcctacgccatgtcctgggtgcgccaggcccctggaaagggactggaatgggtgtccgcgatttcggggtccggcgggagcacctactacgccgattccgtgaagggccgcttcactatctcgcgggacaactccaagaacaccctctacctccaaatgaatagcctgcgggccgaggataccgccgtctactattgcgctaaggtcgtgcgcgacggaatggacgtgtggggacagggtaccaccgtgacagtgtcctcggggggaggcggtagcggcggaggaggaagcggtggtggaggttccgagattgtgctgactcaatcacccgcgaccctgagcctgtcccccggcgaaagggccactctgtcctgtcgggccagccaatcagtctcctcctcgtacctggcctggtaccagcagaagccaggacaggctccgagactccttatctatggcgcatcctcccgcgccaccggaatcccggataggttctcgggaaacggatcggggaccgacttcactctcaccatctcccggctggaaccggaggacttcgccgtgtactactgccagcagtacggcagcccgcctagattcactttcggccccggcaccaaagtggacatcaag

SEQ ID NO: 124 - DNA, 753 bp, Artificial Sequence
  source: /note="Description of Artificial Sequence: Synthetic scFv sequence"
caagtgcagctcgtggagtcaggcggaggactggtgcagcccgggggctccctgagactttcctgcgcggcatcgggttttaccttctcctcctatgctatgtcctgggtgcgccaggccccgggaaagggactggaatgggtgtccgcaatcagcggtagcgggggctcaacatactacgccgactccgtcaagggtcgcttcactatttcccgggacaactccaagaataccctgtacctccaaatgaacagcctcagggccgaggatactgccgtgtactactgcgccaaagtcggatacgatagctccggttactaccgggactactacggaatggacgtgtggggacagggcaccaccgtgaccgtgtcaagcggcggaggcggttcaggagggggaggctccggcggtggagggtccgaaatcgtcctgactcagtcgcctggcactctgtcgttgtccccgggggagcgcgctaccctgtcgtgtcgggcgtcgcagtccgtgtcgagctcctacctcgcgtggtaccagcagaagcccggacaggcccctagacttctgatctacggcacttcttcacgcgccaccgggatcagcgacaggttcagcggctccggctccgggaccgacttcaccctgaccattagccggctggagcctgaagatttcgccgtgtattactgccaacactacggaaactcgccgccaaagttcacgttcggacccggaaccaagctggaaatcaag

SEQ ID NO: 125 - protein, 112 aa, Artificial Sequence
  source: /note="Description of Artificial Sequence: Synthetic scFv sequence"
DIVLTQSPLSLPVTPGEPASISCRSSQSLLHSNGYNYLDWYLQKPGQSPQLLIYLGSNRASGVPDRFSGSGSGTDFTLKISRVEAEDVGVYYCMQALQTPLTFGGGTKVDIK

SEQ ID NO: 126 - protein, 249 aa, Artificial Sequence
  source: /note="Description of Artificial Sequence: Synthetic scFv sequence"
QVQLVQSGAEVRKTGASVKVSCKASGYIFDNFGINWVRQAPGQGLEWMGWINPKNNNTNYAQKFQGRVTITADESTNTAYMEVSSLRSEDTAVYYCARGPYYYQSYMDVWGQGTMVTVSSASGGGGSGGRASGGGGSDIVMTQTPLSLPVTPGEPASISCRSSQSLLHSNGYNYLNWYLQKPGQSPQLLIYLGSKRASGVPDRFSGSGSGTDFTLHITRVGAEDVGVYYCMQALQTPYTFGQGTKLEIK

SEQ ID NO: 127 - protein, 246 aa, Artificial Sequence
  source: /note="Description of Artificial Sequence: Synthetic scFv sequence"
QVQLQESGGGLVQPGGSLRLSCAASGFTFSSDAMTWVRQAPGKGLEWVSVISGSGGTTYYADSVKGRFTISRDNSKNTLYLQMNSLRAEDTAVYYCAKLDSSGYYYARGPRYWGQGTLVTVSSASGGGGSGGRASGGGGSDIQLTQSPSSLSASVGDRVTITCRASQSISSYLNWYQQKPGKAPKLLIYGASTLASGVPARFSGSGSGTHFTLTINSLQSEDSATYYCQQSYKRASFGQGTKVEIK

SEQ ID NO: 128 - protein, 246 aa, Artificial Sequence
  source: /note="Description of Artificial Sequence: Synthetic scFv sequence"
QVQLVESGGGLVQPGRSLRLSCAASGFTFSNYAMSWVRQAPGKGLGWVSGISRSGENTYYADSVKGRFTISRDNSKNTLYLQMNSLRDEDTAVYYCARSPAHYYGGMDVWGQGTTVTVSSASGGGGSGGRASGGGGSDIVLTQSPGTLSLSPGERATLSCRASQSISSSFLAWYQQKPGQAPRLLIYGASRRATGIPDRFSGSGSGTDFTLTISRLEPEDSAVYYCQQYHSSPSWTFGQGTKLEIK

SEQ ID NO: 129 - protein, 244 aa, Artificial Sequence
  source: /note="Description of Artificial Sequence: Synthetic scFv sequence"
QVQLVESGGGLVQPGRSLRLSCAASGFTFDDYAMHWVRQAPGKGLEWVSGISWNSGSIGYADSVKGRFTISRDNAKNSLYLQMNSLRAEDTALYYCSVHSFLAYWGQGTLVTVSSASGGGGSGGRASGGGGSDIVMTQTPLSLPVTPGEPASISCRSSQSLLHSNGYNYLDWYLQKPGQSPQLLIYLGSNRASGVPDRFSGSGSGTDFTLKISRVEAEDVGVYYCMQALQTPYTFGQGTKVEIK

SEQ ID NO: 130 - DNA, 717 bp, Artificial Sequence
  source: /note="Description of Artificial Sequence: Synthetic scFv sequence"
gaagtgcaattggtggaatcagggggaggacttgtgcagcctggaggatcgctgagactgtcatgtgccgtgtccggctttgccctgtccaaccacgggatgtcctgggtccgccgcgcgcctggaaagggcctcgaatgggtgtcgggtattgtgtacagcggtagcacctactatgccgcatccgtgaaggggagattcaccatcagccgggacaactccaggaacactctgtacctccaaatgaattcgctgaggccagaggacactgccatctactactgctccgcgcatggcggagagtccgacgtctggggacaggggaccaccgtgaccgtgtctagcgcgtccggcggaggcggcagcgggggtcgggcatcagggggcggcggatcggacatccagctcacccagtccccgagctcgctgtccgcctccgtgggagatcgggtcaccatcacgtgccgcgccagccagtcgatttcctcctacctgaactggtaccaacagaagcccggaaaagccccgaagcttctcatctacgccgcctcgagcctgcagtcaggagtgccctcacggttctccggctccggttccggtactgatttcaccctgaccatttcctccctgcaaccggaggacttcgctacttactactgccagcagtcgtactccaccccctacactttcggacaaggcaccaaggtcgaaatcaag

SEQ ID NO: 131 - protein, 246 aa, Artificial Sequence
  source: /note="Description of Artificial Sequence: Synthetic scFv sequence"
QVQLVQSGGGLVKPGGSLRLSCAASGFTFSDYYMSWIRQAPGKGLEWVSYISSSGNTIYYADSVKGRFTISRDNAKNSLYLQMNSLRAEDTAVYYCARSTMVREDYWGQGTLVTVSSASGGGGSGGRASGGGGSDIVLTQSPLSLPVTLGQPASISCKSSESLVHNSGKTYLNWFHQRPGQSPRRLIYEVSNRDSGVPDRFTGSGSGTDFTLKISRVEAEDVGVYYCMQGTHWPGTFGQGTKLEIK

SEQ ID NO: 132 - protein, 243 aa, Artificial Sequence
  source: /note="Description of Artificial Sequence: Synthetic scFv sequence"
EVQLLESGGGLVQPGGSLRLSCAVSGFALSNHGMSWVRRAPGKGLEWVSGIVYSGSTYYAASVKGRFTISRDNSRNTLYLQMNSLRPEDTAIYYCSAHGGESDVWGQGTTVTVSSASGGGGSGGRASGGGGSDIVMTQTPLSLSVTPGQPASISCKSSQSLLRNDGKTPLYWYLQKAGQPPQLLIYEVSNRFSGVPDRFSGSGSGTDFTLKISRVEAEDVGAYYCMQNIQFPSFGGGTKLEIK

SEQ ID NO: 133 - protein, 243 aa, Artificial Sequence
  source: /note="Description of Artificial Sequence: Synthetic scFv sequence"
QVQLQESGPGLVKPSETLSLTCTVSGGSISSSYYYWGWIRQPPGKGLEWIGSIYYSGSAYYNPSLKSRVTISVDTSKNQFSLRLSSVTAADTAVYYCARHWQEWPDAFDIWGQGTMVTVSSGGGGSGGGGSGGGGSETTLTQSPAFMSATPGDKVIISCKASQDIDDAMNWYQQKPGEAPLFIIQSATSPVPGIPPRFSGSGFGTDFSLTINNIESEDAAYYFCLQHDNFPLTFGQGTKLEIK

SEQ ID NO: 134 - protein, 246 aa, Artificial Sequence
  source: /note="Description of Artificial Sequence: Synthetic scFv sequence"
EVQLVESGGGLVKPGGSLRLSCAASGFTFSSYSMNWVRQAPGKGLEWVSSISSSSSYIYYADSVKGRFTISRDNAKNSLYLQMNSLRAEDTAVYYCAKTIAAVYAFDIWGQGTTVTVSSGGGGSGGGGSGGGGSEIVLTQSPLSLPVTPEEPASISCRSSQSLLHSNGYNYLDWYLQKPGQSPQLLIYLGSNRASGVPDRFSGSGSGTDFTLKISRVEAEDVGVYYCMQALQTPYTFGQGTKLEIK

SEQ ID NO: 135 - protein, 245 aa, Artificial Sequence
  source: /note="Description of Artificial Sequence: Synthetic scFv sequence"
QVQLQESGPGLVKPSQTLSLTCTVSGGSISSGGYYWSWIRQHPGKGLEWIGYIYYSGSTYYNPSLKSRVTISVDTSKNQFSLKLSSVTAADTAVYYCARAGIAARLRGAFDIWGQGTMVTVSSGGGGSGGGGSGGGGSDIVMTQSPSSVSASVGDRVIITCRASQGIRNWLAWYQQKPGKAPNLLIYAASNLQSGVPSRFSGSGSGADFTLTISSLQPEDVATYYCQKYNSAPFTFGPGTKVDIK

SEQ ID NO: 136 - protein, 253 aa, Artificial Sequence
  source: /note="Description of Artificial Sequence: Synthetic scFv sequence"
QVQLVQSGAEVKKPGSSVKVSCKASGGTFSSYAISWVRQAPGQGLEWMGGIIPIFGTANYAQKFQGRVTITADESTSTAYMELSSLRSEDTAVYYCARRGGYQLLRWDVGLLRSAFDIWGQGTMVTVSSGGGGSGGGGSGGGGSSYVLTQPPSVSVAPGQTARITCGGNNIGSKSVHWYQQKPGQAPVLVLYGKNNRPSGVPDRFSGSRSGTTASLTITGAQAEDEADYYCSSRDSSGDHLRVFGTGTKVTVL

SEQ ID NO: 137 - protein, 248 aa, Artificial Sequence
  source: /note="Description of Artificial Sequence: Synthetic scFv sequence"
EVQLQQSGPGLVKPSQTLSLTCAISGDSVSSNSAAWNWIRQSPSRGLEWLGRTYYRSKWYSFYAISLKSRIIINPDTSKNQFSLQLKSVTPEDTAVYYCARSSPEGLFLYWFDPWGQGTLVTVSSGGDGSGGGGSGGGGSSSELTQDPAVSVALGQTIRITCQGDSLGNYYATWYQQKPGQAPVLVIYGTNNRPSGIPDRFSASSSGNTASLTITGAQAEDEADYYCNSRDSSGHHLLFGTGTKVTVL

SEQ ID NO: 138 - protein, 244 aa, Artificial Sequence
  source: /note="Description of Artificial Sequence: Synthetic scFv sequence"
QIQLVQSGPDLKKPGETVKLSCKASGYTFTNFGMNWVKQAPGKGFKWMAWINTYTGESYFADDFKGRFAFSVETSATTAYLQINNLKTEDTATYFCARGEIYYGYDGGFAYWGQGTLVTVSAGGGGSGGGGSGGGGSDVVMTQSHRFMSTSVGDRVSITCRASQDVNTAVSWYQQKPGQSPKLLIFSASYRYTGVPDRFTGSGSGADFTLTISSVQAEDLAVYYCQQHYSTPWTFGGGTKLDIK

SEQ ID NO: 139 - protein, 249 aa, Artificial Sequence
  source: /note="Description of Artificial Sequence: Synthetic scFv sequence"
QIQLVQSGPELKKPGETVKISCKASGYTFTDYSINWVKRAPGKGLKWMGWINTETREPAYAYDFRGRFAFSLETSASTAYLQINNLKYEDTATYFCALDYSYAMDYWGQGTSVTVSSGGGGSGGGGSGGGGSQIQLVQSGPELKKPGETVKISCKASGYTFTDYSINWVKRAPGKGLKWMGWINTETREPAYAYDFRGRFAFSLETSASTAYLQINNLKYEDTATYFCALDYSYAMDYWGQGTSVTVSS

SEQ ID NO: 140 - protein, 243 aa, Artificial Sequence
  source: /note="Description of Artificial Sequence: Synthetic scFv sequence"
QIQLVQSGPELKKPGETVKISCKASGYTFRHYSMNWVKQAPGKGLKWMGRINTESGVPIYADDFKGRFAFSVETSASTAYLVINNLKDEDTASYFCSNDYLYSLDFWGQGTALTVSSGGGGSGGGGSGGGGSDIVLTQSPPSLAMSLGKRATISCRASESVTILGSHLIYWYQQKPGQPPTLLIQLASNVQTGVPARFSGSGSRTDFTLTIDPVEEDDVAVYYCLQSRTIPRTFGGGTKLEIK

SEQ ID NO: 141 - protein, 243 aa, Artificial Sequence
  source: /note="Description of Artificial Sequence: Synthetic scFv sequence"
QIQLVQSGPELKKPGETVKISCKASGYTFTHYSMNWVKQAPGKGLKWMGRINTETGEPLYADDFKGRFAFSLETSASTAYLVINNLKNEDTATFFCSNDYLYSCDYWGQGTTLTVSSGGGGSGGGGSGGGGSDIVLTQSPPSLAMSLGKRATISCRASESVTILGSHLIYWYQQKPGQPPTLLIQLASNVQTGVPARFSGSGSRTDFTLTIDPVEEDDVAVYYCLQSRTIPRTFGGGTKLEIK

SEQ ID NO: 142 - protein, 246 aa, Artificial Sequence
  source: /note="Description of Artificial Sequence: Synthetic scFv sequence"
EVQLVESGGGLVQPGGSLRLSCAASGFTFSSYAMSWVRQAPGKGLEWVSAISGSGGSTYYADSVKGRFTISRDNSKNTLYLQMNSLRAEDTAVYYCAKVEGSGSLDYWGQGTLVTVSSGGGGSGGGGSGGGGSEIVMTQSPGTLSLSPGERATLSCRASQSVSSAYLAWYQQKPGQPPRLLISGASTRATGIPDRFGGSGSGTDFTLTISRLEPEDFAVYYCQHYGSSFNGSSLFTFGQGTRLEIK

SEQ ID NO: 143 - protein, 248 aa, Artificial Sequence
  source: /note="Description of Artificial Sequence: Synthetic scFv sequence"
EVQLVETGGGLVQPGGSLRLSCAASGFTFSSYAMSWVRQAPGKGLEWVSAISGSGGSTYYADSVKGRFTISRDNSKNTLYLQMNTLKAEDTAVYYCARATYKRELRYYYGMDVWGQGTTVTVSSGGGGSGGGGSGGGGSEIVLTQSPSTLSLSPGESATLSCRASQSVSTTFLAWYQQKPGQAPRLLIYGSSNRATGIPDRFSGSGSGTDFTLTIRRLEPEDFAVYYCQQYHSSPSWTFGQGTKVEIK

SEQ ID NO: 144 - protein, 244 aa, Artificial Sequence
  source: /note="Description of Artificial Sequence: Synthetic scFv sequence"
EVQLLETGGGLVQPGGSLRLSCAASGFSFSSYAMSWVRQAPGKGLEWVSAISGSGGSTYYADSVKGRFTISRDNSKNTLYLQMNSLRAEDTAVYYCAKALVGATGAFDIWGQGTLVTVSSGGGGSGGGGSGGGGSEIVLTQSPGTLSLSPGERATLSCRASQSLSSNFLAWYQQKPGQAPGLLIYGASNWATGTPDRFSGSGSGTDFTLTITRLEPEDFAVYYCQYYGTSPMYTFGQGTKVEIK

SEQ ID NO: 145 - protein, 246 aa, Artificial Sequence
  source: /note="Description of Artificial Sequence: Synthetic scFv sequence"
EVQLVESGGGLVQPGGSLRLSCAASGFTFSSYAMSWVRQAPGKGLEWVSAISGSGGSTYYADSVKGRFTISRDNSKNTLYLQMNSLRAEDTAVYYCAKMGWSSGYLGAFDIWGQGTTVTVSSGGGGSGGGGSGGGGSEIVLTQSPGTLSLSPGERATLSCRASQSVASSFLAWYQQKPGQAPRLLIYGASGRATGIPDRFSGSGSGTDFTLTISRLEPEDFAVYYCQHYGGSPRLTFGGGTKVDIK

SEQ ID NO: 146 - protein, 248 aa, Artificial Sequence
  source: /note="Description of Artificial Sequence: Synthetic scFv sequence"
QVQLVESGGGLVQPGGSLRLSCAASGFTFSSYAMSWVRQAPGKGLEWVSAISGSGGSTYYADSVKGRFTISRDNAKNSLYLQMNSLRAEDTAIYYCARATYKRELRYYYGMDVWGQGTMVTVSSGGGGSGGGGSGGGGSEIVMTQSPGTVSLSPGERATLSCRASQSVSSSFLAWYQQKPGQAPRLLIYGASSRATGIPDRFSGSGSGTDFTLTISRLEPEDSAVYYCQQYHSSPSWTFGQGTRLEIK

SEQ ID NO: 147 - protein, 246 aa, Artificial Sequence
  source: /note="Description of Artificial Sequence: Synthetic scFv sequence"
EVQLVESGGGLVQPGRSLRLSCTASGFTFDDYAMHWVRQRPGKGLEWVASINWKGNSLAYGDSVKGRFAISRDNAKNTVFLQMNSLRTEDTAVYYCASHQGVAYYNYAMDVWGRGTLVTVSSGGGGSGGGGSGGGGSEIVLTQSPGTLSLSPGERATLSCRATQSIGSSFLAWYQQRPGQAPRLLIYGASQRATGIPDRFSGRGSGTDFTLTISRVEPEDSAVYYCQHYESSPSWTFGQGTKVEIK

SEQ ID NO: 148 - protein, 244 aa, Artificial Sequence
  source: /note="Description of Artificial Sequence: Synthetic scFv sequence"
EVQLLESGGGLVQPGGSLRLSCAASGFTFSSYAMSWVRQAPGKGLEWVSAISGSGGSTYYADSVKGRFTISRDNSKNTLYLQMNSLRAEDTAVYYCVLWFGEGFDPWGQGTLVTVSSGGGGSGGGGSGGGGSDIVLTQSPLSLPVTPGEPASISCRSSQSLLHSNGYNYLDWYLQKPGQSPQLLIYLGSNRASGVPDRFSGSGSGTDFTLKISRVEAEDVGVYYCMQALQTPLTFGGGTKVDIK

SEQ ID NO: 149 - protein, 242 aa, Artificial Sequence
  source: /note="Description of Artificial Sequence: Synthetic scFv sequence"
EVQLLESGGGLVQPGGSLRLSCAASGFTFSSYAMSWVRQAPGKGLEWVSAISGSGGSTYYADSVKGRFTISRDNSKNTLYLQMNSLRAEDTAVYYCAKIPQTGTFDYWGQGTLVTVSSGGGGSGGGGSGGGGSEIVLTQSPGTLSLSPGERATLSCRASQSVSSSYLAWYQQRPGQAPRLLIYGASSRATGIPDRFSGSGSGTDFTLTISRLEPEDFAVYYCQHYGSSPSWTFGQGTRLEIK

SEQ ID NO: 150 - protein, 245 aa, Artificial Sequence
  source: /note="Description of Artificial Sequence: Synthetic scFv sequence"
DIELTQSPSSLAVSAGEKVTMSCKSSQSILYSSNQKNYLAWYQQKPGQSPKLLIYWASTRESGVPDRFTGSGSGTDFTLTISSVQAEDLAVYYCHQYLSSYTFGGGTKLEIKGGGGSGGGGSGGGGSQVQLQQSGPELVRPGASVRISCKASGYTFASYYIQWMKQRPGQGLEWIGWINPGNVNTKYNEKFKGKATLTADKSSTTAYMQLSSLTSEDSAVYFCARSTYYRPLDYWGQGTTVTVSS

SEQ ID NO: 151 - protein, 235 aa, Artificial Sequence
  source: /note="Description of Artificial Sequence: Synthetic scFv sequence"
DIELTQSPSSLAVSAGEKVTMSCKSSQSILYSSNQKNYLAWYQQKPGQSPKLLIYWASTRESGVPDRFTGSGSGTDFTLTISSVQAEDLAVYYCHQYLSSYTFGGGTKLEIKGGGGSQVQLQQSGPELVRPGASVRISCKASGYTFASYYIQWMKQRPGQGLEWIGWINPGNVNTKYNEKFKGKATLTADKSSTTAYMQLSSLTSEDSAVYFCARSTYYRPLDYWGQGTTVTVSS

SEQ ID NO: 152 - protein, 244 aa, Artificial Sequence
  source: /note="Description of Artificial Sequence: Synthetic scFv sequence"
DIVLTQSPASLAVSLGQRATISCRASESVDNYGNTFMHWYQQKPGQPPKLLIYRASNLESGIPARFSGSGSRTDFTLTINPVEADDVATYYCQQSNEDPPTFGAGTKLELKGGGGSGGGGSSGGGSQIQLVQSGPELKKPGETVKISCKASGYIFTNYGMNWVKQAPGKSFKWMGWINTYTGESTYSADFKGRFAFSLETSASTAYLHINDLKNEDTATYFCARSGGYDPMDYWGQGTSVTVSS

SEQ ID NO: 153 - protein, 237 aa, Artificial Sequence
  source: /note="Description of Artificial Sequence: Synthetic scFv sequence"
DVQITQSPSYLAASPGETITINCRASKSISKDLAWYQEKPGKTNKLLIYSGSTLQSGIPSRFSGSGSGTDFTLTISSLEPEDFAMYYCQQHNKYPYTFGGGTKLEIKGGGGSGGGGSSGGGSQVQLQQPGAELVRPGASVKLSCKASGYTFTSYWMNWVKQRPDQGLEWIGRIDPYDSETHYNQKFKDKAILTVDKSSSTAYMQLSSLTSEDSAVYYCARGNWDDYWGQGTTLTVSS

SEQ ID NO: 154 - protein, 263 aa, Artificial Sequence
  source: /note="Description of Artificial Sequence: Synthetic scFv sequence"
MALPVTALLLPLALLLHAARPDVQLTQSPSFLSASVGDRVTITCRASKSISKDLAWYQQKPGKAPKLLIYSGSTLQSGVPSRFSGSGSGTEFTLTISSLQPEDFATYYCQQHNKYPYTFGGGTKVEIKGGGGSGGGGSGGGGSGGGGSEVQLVESGGGLVQPGGSLRLSCAASGYTFTSYWMNWVRQAPGKGLVWVSRIDPYDSETHYNQKFKDRFTISVDKAKSTAYLQMNSLRAEDTAVYYCARGNWDDYWGQGTTVTVSS

SEQ ID NO: 155 - protein, 263 aa, Artificial Sequence
  source: /note="Description of Artificial Sequence: Synthetic scFv sequence"
MALPVTALLLPLALLLHAARPDVQLTQSPSFLSASVGDRVTITCRASKSISKDLAWYQQKPGKAPKLLIYSGSTLQSGVPSRFSGSGSGTEFTLTISSLQPEDFATYYCQQHNKYPYTFGGGTKVEIKGGGGSGGGGSGGGGSGGGGSEVQLVQSGAEVKKPGESLRISCKGSGYTFTSYWMNWVRQMPGKGLEWMGRIDPYDSETHYNQKFKDHVTISVDKSISTAYLQWSSLKASDTAMYYCARGNWDDYWGQGTTVTVSS

SEQ ID NO: 156 - protein, 263 aa, Artificial Sequence
  source: /note="Description of Artificial Sequence: Synthetic scFv sequence"
MALPVTALLLPLALLLHAARPDVQLTQSPSFLSASVGDRVTITCRASKSISKDLAWYQQKPGKAPKLLIYSGSTLQSGVPSRFSGSGSGTEFTLTISSLQPEDFATYYCQQHNKYPYTFGGGTKVEIKGGGGSGGGGSGGGGSGGGGSQVQLVQSGAEVKKPGASVKVSCKASGYTFTSYWMNWVRQAPGQGLEWMGRIDPYDSETHYNQKFKDRVTMTVDKSTSTAYMELSSLRSEDTAVYYCARGNWDDYWGQGTTVTVSS

SEQ ID NO: 157 - protein, 263 aa, Artificial Sequence
  source: /note="Description of Artificial Sequence: Synthetic scFv sequence"
MALPVTALLLPLALLLHAARPDVQLTQSPSFLSASVGDRVTITCRASKSISKDLAWYQQKPGKAPKLLIYSGSTLQSGVPSRFSGSGSGTEFTLTISSLQPEDFATYYCQQHNKYPYTFGGGTKVEIKGGGGSGGGGSGGGGSGGGGSQVQLVQSGSELKKPGASVKVSCKASGYTFTSYWMNWVRQAPGQGLEWMGRIDPYDSETHYNQKFKDRFVFSVDKSVSTAYLQISSLKAEDTAVYYCARGNWDDYWGQGTTVTVSS

SEQ ID NO: 158 - protein, 263 aa, Artificial Sequence
  source: /note="Description of Artificial Sequence: Synthetic scFv sequence"
MALPVTALLLPLALLLHAARPDVVMTQSPAFLSVTPGEKVTITCRASKSISKDLAWYQQKPDQAPKLLIYSGSTLQSGVPSRFSGSGSGTDFTFTISSLEAEDAATYYCQQHNKYPYTFGGGTKVEIKGGGGSGGGGSGGGGSGGGGSEVQLVESGGGLVQPGGSLRLSCAASGYTFTSYWMNWVRQAPGKGLVWVSRIDPYDSETHYNQKFKDRFTISVDKAKSTAYLQMNSLRAEDTAVYYCARGNWDDYWGQGTTVTVSS

SEQ ID NO: 159 - protein, 263 aa, Artificial Sequence
  source: /note="Description of Artificial Sequence: Synthetic scFv sequence"
MALPVTALLLPLALLLHAARPDVVMTQSPAFLSVTPGEKVTITCRASKSISKDLAWYQQKPDQAPKLLIYSGSTLQSGVPSRFSGSGSGTDFTFTISSLEAEDAATYYCQQHNKYPYTFGGGTKVEIKGGGGSGGGGSGGGGSGGGGSEVQLVQSGAEVKKPGESLRISCKGSGYTFTSYWMNWVRQMPGKGLEWMGRIDPYDSETHYNQKFKDHVTISVDKSISTAYLQWSSLKASDTAMYYCARGNWDDYWGQGTTVTVSS

SEQ ID NO: 160 - protein, 263 aa, Artificial Sequence
  source: /note="Description of Artificial Sequence: Synthetic scFv sequence"
MALPVTALLLPLALLLHAARPDVVMTQSPAFLSVTPGEKVTITCRASKSISKDLAWYQQKPDQAPKLLIYSGSTLQSGVPSRFSGSGSGTDFTFTISSLEAEDAATYYCQQHNKYPYTFGGGTKVEIKGGGGSGGGGSGGGGSGGGGSQVQLVQSGAEVKKPGASVKVSCKASGYTFTSYWMNWVRQAPGQGLEWMGRIDPYDSETHYNQKFKDRVTMTVDKSTSTAYMELSSLRSEDTAVYYCARGNWDDYWGQGTTVTVSS

SEQ ID NO: 161 - protein, 263 aa, Artificial Sequence
  source: /note="Description of Artificial Sequence: Synthetic scFv sequence"
MALPVTALLLPLALLLHAARPDVVMTQSPAFLSVTPGEKVTITCRASKSISKDLAWYQQKPDQAPKLLIYSGSTLQSGVPSRFSGSGSGTDFTFTISSLEAEDAATYYCQQHNKYPYTFGGGTKVEIKGGGGSGGGGSGGGGSGGGGSQVQLVQSGSELKKPGASVKVSCKASGYTFTSYWMNWVRQAPGQGLEWMGRIDPYDSETHYNQKFKDRFVFSVDKSVSTAYLQISSLKAEDTAVYYCARGNWDDYWGQGTTVTVSS

SEQ ID NO: 162 - protein, 263 aa, Artificial Sequence
  source: /note="Description of Artificial Sequence: Synthetic scFv sequence"
MALPVTALLLPLALLLHAARPDVVMTQSPDSLAVSLGERATINCRASKSISKDLAWYQQKPGQPPKLLIYSGSTLQSGVPDRFSGSGSGTDFTLTISSLQAEDVAVYYCQQHNKYPYTFGGGTKVEIKGGGGSGGGGSGGGGSGGGGSEVQLVESGGGLVQPGGSLRLSCAASGYTFTSYWMNWVRQAPGKGLVWVSRIDPYDSETHYNQKFKDRFTISVDKAKSTAYLQMNSLRAEDTAVYYCARGNWDDYWGQGTTVTVSS

SEQ ID NO: 163 - protein, 263 aa, Artificial Sequence
  source: /note="Description of Artificial Sequence: Synthetic scFv sequence"
MALPVTALLLPLALLLHAARPDVVMTQSPDSLAVSLGERATINCRASKSISKDLAWYQQKPGQPPKLLIYSGSTLQSGVPDRFSGSGSGTDFTLTISSLQAEDVAVYYCQQHNKYPYTFGGGTKVEIKGGGGSGGGGSGGGGSGGGGSEVQLVQSGAEVKKPGESLRISCKGSGYTFTSYWMNWVRQMPGKGLEWMGRIDPYDSETHYNQKFKDHVTISVDKSISTAYLQWSSLKASDTAMYYCARGNWDDYWGQGTTVTVSS

SEQ ID NO: 164 - protein, 263 aa, Artificial Sequence
  source: /note="Description of Artificial Sequence: Synthetic scFv sequence"
MALPVTALLLPLALLLHAARPDVVMTQSPDSLAVSLGERATINCRASKSISKDLAWYQQKPGQPPKLLIYSGSTLQSGVPDRFSGSGSGTDFTLTISSLQAEDVAVYYCQQHNKYPYTFGGGTKVEIKGGGGSGGGGSGGGGSGGGGSQVQLVQSGAEVKKPGASVKVSCKASGYTFTSYWMNWVRQAPGQGLEWMGRIDPYDSETHYNQKFKDRVTMTVDKSTSTAYMELSSLRSEDTAVYYCARGNWDDYWGQGTTVTVSS

SEQ ID NO: 165 - protein, 263 aa, Artificial Sequence
  source: /note="Description of Artificial Sequence: Synthetic scFv sequence"
MALPVTALLLPLALLLHAARPDVVMTQSPDSLAVSLGERATINCRASKSISKDLAWYQQKPGQPPKLLIYSGSTLQSGVPDRFSGSGSGTDFTLTISSLQAEDVAVYYCQQHNKYPYTFGGGTKVEIKGGGGSGGGGSGGGGSGGGGSQVQLVQSGSELKKPGASVKVSCKASGYTFTSYWMNWVRQAPGQGLEWMGRIDPYDSETHYNQKFKDRFVFSVDKSVSTAYLQISSLKAEDTAVYYCARGNWDDYWGQGTTVTVSS

SEQ ID NO: 166 - protein, 282 aa, Artificial Sequence
  source: /note="Description of Artificial Sequence: Synthetic scFv sequence"
MALPVTALLLPLALLLHAARPEVKLVESGGGLVQPGGSLSLSCAASGFTFTDYYMSWVRQPPGKALEWLALIRSKADGYTTEYSASVKGRFTLSRDDSQSILYLQMNALRPEDSATYYCARDAAYYSYYSPEGAMDYWGQGTSVTVSSGGGGSGGGGSGGGGSMADYKDIVMTQSHKFMSTSVGDRVNITCKASQNVDSAVAWYQQKPGQSPKALIYSASYRYSGVPDRFTGRGSGTDFTLTISSVQAEDLAVYYCQQYYSTPWTFGGGTKLEIKRSDPTSS

SEQ ID NO: 167 - protein, 263 aa, Artificial Sequence
  source: /note="Description of Artificial Sequence: Synthetic scFv sequence"
MALPVTALLLPLALLLHAARPEVQLVESGGGLVQPGGSLRLSCAASGYTFTSYWMNWVRQAPGKGLVWVSRIDPYDSETHYNQKFKDRFTISVDKAKSTAYLQMNSLRAEDTAVYYCARGNWDDYWGQGTTVTVSSGGGGSGGGGSGGGGSGGGGSDVQLTQSPSFLSASVGDRVTITCRASKSISKDLAWYQQKPGKAPKLLIYSGSTLQSGVPSRFSGSGSGTEFTLTISSLQPEDFATYYCQQHNKYPYTFGGGTKVEIK

SEQ ID NO: 168 - protein, 263 aa, Artificial Sequence
  source: /note="Description of Artificial Sequence: Synthetic scFv sequence"
MALPVTALLLPLALLLHAARPEVQLVESGGGLVQPGGSLRLSCAASGYTFTSYWMNWVRQAPGKGLVWVSRIDPYDSETHYNQKFKDRFTISVDKAKSTAYLQMNSLRAEDTAVYYCARGNWDDYWGQGTTVTVSSGGGGSGGGGSGGGGSGGGGSDVVMTQSPAFLSVTPGEKVTITCRASKSISKDLAWYQQKPDQAPKLLIYSGSTLQSGVPSRFSGSGSGTDFTFTISSLEAEDAATYYCQQHNKYPYTFGGGTKVEIK

SEQ ID NO: 169 - protein, 263 aa, Artificial Sequence
  source: /note="Description of Artificial Sequence: Synthetic scFv sequence"
MALPVTALLLPLALLLHAARPEVQLVESGGGLVQPGGSLRLSCAASGYTFTSYWMNWVRQAPGKGLVWVSRIDPYDSETHYNQKFKDRFTISVDKAKSTAYLQMNSLRAEDTAVYYCARGNWDDYWGQGTTVTVSSGGGGSGGGGSGGGGSGGGGSDVVMTQSPDSLAVSLGERATINCRASKSISKDLAWYQQKPGQPPKLLIYSGSTLQSGVPDRFSGSGSGTDFTLTISSLQAEDVAVYYCQQHNKYPYTFGGGTKVEIK

SEQ ID NO: 170 - protein, 263 aa, Artificial Sequence
  source: /note="Description of Artificial Sequence: Synthetic scFv sequence"
MALPVTALLLPLALLLHAARPEVQLVESGGGLVQPGGSLRLSCAASGYTFTSYWMNWVRQAPGKGLVWVSRIDPYDSETHYNQKFKDRFTISVDKAKSTAYLQMNSLRAEDTAVYYCARGNWDDYWGQGTTVTVSSGGGGSGGGGSGGGGSGGGGSEVVLTQSPATLSLSPGERATLSCRASKSISKDLAWYQQKPGQAPRLLIYSGSTLQSGIPARFSGSGSGTDFTLTISSLEPEDFAVYYCQQHNKYPYTFGGGTKVEIK

SEQ ID NO: 171 - protein, 263 aa, Artificial Sequence
  source: /note="Description of Artificial Sequence: Synthetic scFv sequence"
MALPVTALLLPLALLLHAARPEVQLVQSGAEVKKPGESLRISCKGSGYTFTSYWMNWVRQMPGKGLEWMGRIDPYDSETHYNQKFKDHVTISVDKSISTAYLQWSSLKASDTAMYYCARGNWDDYWGQGTTVTVSSGGGGSGGGGSGGGGSGGGGSDVQLTQSPSFLSASVGDRVTITCRASKSISKDLAWYQQKPGKAPKLLIYSGSTLQSGVPSRFSGSGSGTEFTLTISSLQPEDFATYYCQQHNKYPYTFGGGTKVEIK

SEQ ID NO: 172 - protein, 263 aa, Artificial Sequence
  source: /note="Description of Artificial Sequence: Synthetic scFv sequence"
MALPVTALLLPLALLLHAARPEVQLVQSGAEVKKPGESLRISCKGSGYTFTSYWMNWVRQMPGKGLEWMGRIDPYDSETHYNQKFKDHVTISVDKSISTAYLQWSSLKASDTAMYYCARGNWDDYWGQGTTVTVSSGGGGSGGGGSGGGGSGGGGSDVVMTQSPAFLSVTPGEKVTITCRASKSISKDLAWYQQKPDQAPKLLIYSGSTLQSGVPSRFSGSGSGTDFTFTISSLEAEDAATYYCQQHNKYPYTFGGGTKVEIK

SEQ ID NO: 173 - protein, 263 aa, Artificial Sequence
  source: /note="Description of Artificial Sequence: Synthetic scFv sequence"
MALPVTALLLPLALLLHAARPEVQLVQSGAEVKKPGESLRISCKGSGYTFTSYWMNWVRQMPGKGLEWMGRIDPYDSETHYNQKFKDHVTISVDKSISTAYLQWSSLKASDTAMYYCARGNWDDYWGQGTTVTVSSGGGGSGGGGSGGGGSGGGGSDVVMTQSPDSLAVSLGERATINCRASKSISKDLAWYQQKPGQPPKLLIYSGSTLQSGVPDRFSGSGSGTDFTLTISSLQAEDVAVYYCQQHNKYPYTFGGGTKVEIK

SEQ ID NO: 174 - protein, 263 aa, Artificial Sequence
  source: /note="Description of Artificial Sequence: Synthetic scFv sequence"
MALPVTALLLPLALLLHAARPEVQLVQSGAEVKKPGESLRISCKGSGYTFTSYWMNWVRQMPGKGLEWMGRIDPYDSETHYNQKFKDHVTISVDKSISTAYLQWSSLKASDTAMYYCARGNWDDYWGQGTTVTVSSGGGGSGGGGSGGGGSGGGGSEVVLTQSPATLSLSPGERATLSCRASKSISKDLAWYQQKPGQAPRLLIYSGSTLQSGIPARFSGSGSGTDFTLTISSLEPEDFAVYYCQQHNKYPYTFGGGTKVEIK

SEQ ID NO: 175 - protein, 263 aa, Artificial Sequence
  source: /note="Description of Artificial Sequence: Synthetic scFv sequence"
MALPVTALLLPLALLLHAARPEVVLTQSPATLSLSPGERATLSCRASKSISKDLAWYQQKPGQAPRLLIYSGSTLQSGIPARFSGSGSGTDFTLTISSLEPEDFAVYYCQQHNKYPYTFGGGTKVEIKGGGGSGGGGSGGGGSGGGGSEVQLVESGGGLVQPGGSLRLSCAASGYTFTSYWMNWVRQAPGKGLVWVSRIDPYDSETHYNQKFKDRFTISVDKAKSTAYLQMNSLRAEDTAVYYCARGNWDDYWGQGTTVTVSS

SEQ ID NO: 176 - protein, 263 aa, Artificial Sequence
  source: /note="Description of Artificial Sequence: Synthetic scFv sequence"
MALPVTALLLPLALLLHAARPEVVLTQSPATLSLSPGERATLSCRASKSISKDLAWYQQKPGQAPRLLIYSGSTLQSGIPARFSGSGSGTDFTLTISSLEPEDFAVYYCQQHNKYPYTFGGGTKVEIKGGGGSGGGGSGGGGSGGGGSEVQLVQSGAEVKKPGESLRISCKGSGYTFTSYWMNWVRQMPGKGLEWMGRIDPYDSETHYNQKFKDHVTISVDKSISTAYLQWSSLKASDTAMYYCARGNWDDYWGQGTTVTVSS

SEQ ID NO: 177 - protein, 263 aa, Artificial Sequence
  source: /note="Description of Artificial Sequence: Synthetic scFv sequence"
MALPVTALLLPLALLLHAARPEVVLTQSPATLSLSPGERATLSCRASKSISKDLAWYQQKPGQAPRLLIYSGSTLQSGIPARFSGSGSGTDFTLTISSLEPEDFAVYYCQQHNKYPYTFGGGTKVEIKGGGGSGGGGSGGGGSGGGGSQVQLVQSGAEVKKPGASVKVSCKASGYTFTSYWMNWVRQAPGQGLEWMGRIDPYDSETHYNQKFKDRVTMTVDKSTSTAYMELSSLRSEDTAVYYCARGNWDDYWGQGTTVTVSS

SEQ ID NO: 178 - protein, 263 aa, Artificial Sequence
  source: /note="Description of Artificial Sequence: Synthetic scFv sequence"
MALPVTALLLPLALLLHAARPEVVLTQSPATLSLSPGERATLSCRASKSISKDLAWYQQKPGQAPRLLIYSGSTLQSGIPARFSGSGSGTDFTLTISSLEPEDFAVYYCQQHNKYPYTFGGGTKVEIKGGGGSGGGGSGGGGSGGGGSQVQLVQSGSELKKPGASVKVSCKASGYTFTSYWMNWVRQAPGQGLEWMGRIDPYDSETHYNQKFKDRFVFSVDKSVSTAYLQISSLKAEDTAVYYCARGNWDDYWGQGTTVTVSS

SEQ ID NO: 179 - protein, 263 aa, Artificial Sequence
  source: /note="Description of Artificial Sequence: Synthetic scFv sequence"
MALPVTALLLPLALLLHAARPQVQLVQSGAEVKKPGASVKVSCKASGYTFTSYWMNWVRQAPGQGLEWMGRIDPYDSETHYNQKFKDRVTMTVDKSTSTAYMELSSLRSEDTAVYYCARGNWDDYWGQGTTVTVSSGGGGSGGGGSGGGGSGGGGSDVQLTQSPSFLSASVGDRVTITCRASKSISKDLAWYQQKPGKAPKLLIYSGSTLQSGVPSRFSGSGSGTEFTLTISSLQPEDFATYYCQQHNKYPYTFGGGTKVEIK

SEQ ID NO: 180 - protein, 263 aa, Artificial Sequence
  source: /note="Description of Artificial Sequence: Synthetic scFv sequence"
MALPVTALLLPLALLLHAARPQVQLVQSGAEVKKPGASVKVSCKASGYTFTSYWMNWVRQAPGQGLEWMGRIDPYDSETHYNQKFKDRVTMTVDKSTSTAYMELSSLRSEDTAVYYCARGNWDDYWGQGTTVTVSSGGGGSGGGGSGGGGSGGGGSDVVMTQSPAFLSVTPGEKVTITCRASKSISKDLAWYQQKPDQAPKLLIYSGSTLQSGVPSRFSGSGSGTDFTFTISSLEAEDAATYYCQQHNKYPYTFGGGTKVEIK

SEQ ID NO: 181 - protein, 263 aa, Artificial Sequence
  source: /note="Description of Artificial Sequence: Synthetic scFv sequence"
MALPVTALLLPLALLLHAARPQVQLVQSGAEVKKPGASVKVSCKASGYTFTSYWMNWVRQAPGQGLEWMGRIDPYDSETHYNQKFKDRVTMTVDKSTSTAYMELSSLRSEDTAVYYCARGNWDDYWGQGTTVTVSSGGGGSGGGGSGGGGSGGGGSDVVMTQSPDSLAVSLGERATINCRASKSISKDLAWYQQKPGQPPKLLIYSGSTLQSGVPDRFSGSGSGTDFTLTISSLQAEDVAVYYCQQHNKYPYTFGGGTKVEIK

SEQ ID NO: 182 - protein, 263 aa, Artificial Sequence
  source: /note="Description of Artificial Sequence: Synthetic scFv sequence"
MALPVTALLLPLALLLHAARPQVQLVQSGAEVKKPGASVKVSCKASGYTFTSYWMNWVRQAPGQGLEWMGRIDPYDSETHYNQKFKDRVTMTVDKSTSTAYMELSSLRSEDTAVYYCARGNWDDYWGQGTTVTVSSGGGGSGGGGSGGGGSGGGGSEVVLTQSPATLSLSPGERATLSCRASKSISKDLAWYQQKPGQAPRLLIYSGSTLQSGIPARFSGSGSGTDFTLTISSLEPEDFAVYYCQQHNKYPYTFGGGTKVEIK

SEQ ID NO: 183 - protein, 263 aa, Artificial Sequence
  source: /note="Description of Artificial Sequence: Synthetic scFv sequence"
MALPVTALLLPLALLLHAARPQVQLVQSGSELKKPGASVKVSCKASGYTFTSYWMNWVRQAPGQGLEWMGRIDPYDSETHYNQKFKDRFVFSVDKSVSTAYLQISSLKAEDTAVYYCARGNWDDYWGQGTTVTVSSGGGGSGGGGSGGGGSGGGGSDVQLTQSPSFLSASVGDRVTITCRASKSISKDLAWYQQKPGKAPKLLIYSGSTLQSGVPSRFSGSGSGTEFTLTISSLQPEDFATYYCQQHNKYPYTFGGGTKVEIK

SEQ ID NO: 184 - protein, 263 aa, Artificial Sequence
  source: /note="Description of Artificial Sequence: Synthetic scFv sequence"
MALPVTALLLPLALLLHAARPQVQLVQSGSELKKPGASVKVSCKASGYTFTSYWMNWVRQAPGQGLEWMGRIDPYDSETHYNQKFKDRFVFSVDKSVSTAYLQISSLKAEDTAVYYCARGNWDDYWGQGTTVTVSSGGGGSGGGGSGGGGSGGGGSDVVMTQSPAFLSVTPGEKVTITCRASKSISKDLAWYQQKPDQAPKLLIYSGSTLQSGVPSRFSGSGSGTDFTFTISSLEAEDAATYYCQQHNKYPYTFGGGTKVEIK

SEQ ID NO: 185 - protein, 263 aa, Artificial Sequence
  source: /note="Description of Artificial Sequence: Synthetic scFv sequence"
MALPVTALLLPLALLLHAARPQVQLVQSGSELKKPGASVKVSCKASGYTFTSYWMNWVRQAPGQGLEWMGRIDPYDSETHYNQKFKDRFVFSVDKSVSTAYLQISSLKAEDTAVYYCARGNWDDYWGQGTTVTVSSGGGGSGGGGSGGGGSGGGGSDVVMTQSPDSLAVSLGERATINCRASKSISKDLAWYQQKPGQPPKLLIYSGSTLQSGVPDRFSGSGSGTDFTLTISSLQAEDVAVYYCQQHNKYPYTFGGGTKVEIK

SEQ ID NO: 186 - protein, 263 aa, Artificial Sequence
  source: /note="Description of Artificial Sequence: Synthetic scFv sequence"
MALPVTALLLPLALLLHAARPQVQLVQSGSELKKPGASVKVSCKASGYTFTSYWMNWVRQAPGQGLEWMGRIDPYDSETHYNQKFKDRFVFSVDKSVSTAYLQISSLKAEDTAVYYCARGNWDDYWGQGTTVTVSSGGGGSGGGGSGGGGSGGGGSEVVLTQSPATLSLSPGERATLSCRASKSISKDLAWYQQKPGQAPRLLIYSGSTLQSGIPARFSGSGSGTDFTLTISSLEPEDFAVYYCQQHNKYPYTFGGGTKVEIK

SEQ ID NO: 187 - protein, 245 aa, Artificial Sequence
  source: /note="Description of Artificial Sequence: Synthetic scFv sequence"
QVQLQQSGAEVKKSGASVKVSCKASGYTFTDYYMHWLRQAPGQGLEWMGWINPNSGDTNYAQKFQGRVTLTRDTSISTVYMELSRLRSDDTAVYYCARDMNILATVPFDIWGQGTMVTVSSASGGGGSGGRASGGGGSDIQMTQSPSSLSASVGDRVTITCRASQSISSYLNWYQQKPGKAPKLLIYAASSLQSGVPSRFSGSGSGTDFTLTISSLQPEDFATYYCQQGDSVPLTFGGGTKVEIK

SEQ ID NO: 188 - protein, 243 aa, Artificial Sequence
  source: /note="Description of Artificial Sequence: Synthetic scFv sequence"
QVQLVQSGAEVKKPGASVKVSCKASGYIFTGYYIHWVRQAPGQGLEWMGWINPNSGGTNYAQKFQGRVTMTRDTSISTAYMELSGLRSDDPAVYYCARDMNILATVPFDIWGQGTLVTVSSGGGGSGGGGSGGGGSDIQLTQSPSSLSASVGDRVTITCRASQSISSYLNWYQQKPGKAPKLLIYAASSLQSGVPSRFSGSGSGTDFTLTVNSLQPEDFATYYCQQGDSVPLTFGGGTKVEIK

SEQ ID NO: 189 - protein, 243 aa, Artificial Sequence
  source: /note="Description of Artificial Sequence: Synthetic scFv sequence"
QVQLVQSGAEVKKPGASVKVSCKASGYTFTGYYMHWVRQAPGQGLEWMGWINPNSGGTNYAQKFQGRVTLTRDTSISTVYMELSRLRSDDTAVYYCARDMNILATVPFDIWGQGTMVTVSSGGGGSGGGGSGGGGSDIQMTQSPSSLSASVGDRVTITCRASQSISSYLNWYQQKPGKAPKLLIYAASSLQSGVPSRFSGSGSGTDFTLTVNSLQPEDFATYYCQQGDSVPLTFGGGTRLEIK

SEQ ID NO: 190 - protein, 243 aa, Artificial Sequence
  source: /note="Description of Artificial Sequence: Synthetic scFv sequence"
QVQLVQSGAEVKKPGASVKVSCKASGYTFTGYYMHWVRQAPGQGLEWMGWINPNSGGTNYAQKFQGRVTMTRDTSISTAYMELSRLRSDDTAVYYCARDMNILATVPFDIWGQGTMVTVSSGGGGSGGGGSGGGGSDIQMTQSPSSLSASVGDRVTITCRASQSISTYLNWYQQKPGKAPNLLIYAAFSLQSGVPSRFSGSGSGTDFTLTINSLQPEDFATYYCQQGDSVPLTFGGGTKLEIK

SEQ ID NO: 191 - protein, 264 aa, Artificial Sequence
  source: /note="Description of Artificial Sequence: Synthetic scFv sequence"
MALPVTALLLPLALLLHAARPQVQLVQSGAEVKKPGASVKVSCKASGYTFTGYYMHWVRQAPGQGLEWMGWINPNSGGTNYAQKFQGRVTMTRDTSISTAYMELSRLRSDDTAVYYCARDMNILATVPFDIWGQGTMVTVSSGGGGSGGGGSGGGGSDIQMTQSPSSLSASVGDRVTITCRASQSISTYLNWYQQKPGKAPNLLIYAAFSLQSGVPSRFSGSGSGTDFTLTINSLQPEDFATYYCQQGDSVPLTFGGGTKLEIK

SEQ ID NO: 192 - protein, 264 aa, Artificial Sequence
  source: /note="Description of Artificial Sequence: Synthetic scFv sequence"
MALPVTALLLPLALLLHAARPQVQLVQSGAEVKKPGASVKVSCKASGYTFTGYYMHWVRQAPGQGLEWMGWINPNSGGTNYAQKFQGRVTLTRDTSISTVYMELSRLRSDDTAVYYCARDMNILATVPFDIWGQGTMVTVSSGGGGSGGGGSGGGGSDIQMTQSPSSLSASVGDRVTITCRASQSISSYLNWYQQKPGKAPKLLIYAASSLQSGVPSRFSGSGSGTDFTLTVNSLQPEDFATYYCQQGDSVPLTFGGGTRLEIK

SEQ ID NO: 193 - protein, 264 aa, Artificial Sequence
  source: /note="Description of Artificial Sequence: Synthetic scFv sequence"
MALPVTALLLPLALLLHAARPQVQLVQSGAEVKKPGASVKVSCKASGYIFTGYYIHWVRQAPGQGLEWMGWINPNSGGTNYAQKFQGRVTMTRDTSISTAYMELSGLRSDDPAVYYCARDMNILATVPFDIWGQGTLVTVSSGGGGSGGGGSGGGGSDIQLTQSPSSLSASVGDRVTITCRASQSISSYLNWYQQKPGKAPKLLIYAASSLQSGVPSRFSGSGSGTDFTLTVNSLQPEDFATYYCQQGDSVPLTFGGGTKVEIK

SEQ ID NO: 194 - protein, 266 aa, Artificial Sequence
  source: /note="Description of Artificial Sequence: Synthetic scFv sequence"
MALPVTALLLPLALLLHAARPQVQLQQSGAEVKKSGASVKVSCKASGYTFTDYYMHWLRQAPGQGLEWMGWINPNSGDTNYAQKFQGRVTLTRDTSISTVYMELSRLRSDDTAVYYCARDMNILATVPFDIWGQGTMVTVSSASGGGGSGGRASGGGGSDIQMTQSPSSLSASVGDRVTITCRASQSISSYLNWYQQKPGKAPKLLIYAASSLQSGVPSRFSGSGSGTDFTLTISSLQPEDFATYYCQQGDSVPLTFGGGTKVEIK

SEQ ID NO: 195 - protein, 249 aa, Artificial Sequence
  source: /note="Description of Artificial Sequence: Synthetic scFv sequence"
DIVLTQSPDSLAVSLGERATINCRASESVDNYGNTFMHWYQQKPGQPPKLLIYRASNLESGVPDRFSGSGSRTDIFITISSLQAEDVAVYYCQQSNEDPPTFGQGTKLEIKGGGGSGGGGSGGGGSGGGGSQIQLVQSGSELKKPGASVKVSCKASGYIFTNYGMNWVRQAPGQGLEWMGWINTYTGESTYSADFKGRFVFSLDTSVSTAYLQINALKAEDTAVYYCARSGGYDPMDYWGQGTTVTVSS

SEQ ID NO: 196 - protein, 249 aa, Artificial Sequence
  source: /note="Description of Artificial Sequence: Synthetic scFv sequence"
DIVLTQSPDSLAVSLGERATINCRASESVDNYGNTFMHWYQQKPGQPPKLLIYRASNLESGVPDRFSGSGSRTDFTLTISSLQAEDVAVYYCQQSNEDPPTFGQGTKLEIKGGGGSGGGGSGGGGSGGGGSQIQLVQSGAEVKKPGASVKVSCKASGYIFTNYGMNWVRQAPGQRLEWMGWINTYTGESTYSADFKGRVTITLDTSASTAYMELSSLRSEDTAVYYCARSGGYDPMDYWGQGTTVTVSS

SEQ ID NO: 197 - protein, 249 aa, Artificial Sequence
  source: /note="Description of Artificial Sequence: Synthetic scFv sequence"
EIVLTQSPATLSLSPGERATLSCRASESVDNYGNTFMHWYQQKPGQAPRLLIYRASNLESGIPARFSGSGSRTDFTLTISSLEPEDVAVYYCQQSNEDPPTFGQGTKLEIKGGGGSGGGGSGGGGSGGGGSQIQLVQSGSELKKPGASVKVSCKASGYIFTNYGMNWVRQAPGQGLEWMGWINTYTGESTYSADFKGRFVFSLDTSVSTAYLQINALKAEDTAVYYCARSGGYDPMDYWGQGTTVTVSS

SEQ ID NO: 198 - protein, 249 aa, Artificial Sequence
  source: /note="Description of Artificial Sequence: Synthetic scFv sequence"
EIVLTQSPATLSLSPGERATLSCRASESVDNYGNTFMHWYQQKPGQAPRLLIYRASNLESGIPARFSGSGSRTDFTLTISSLEPEDVAVYYCQQSNEDPPTFGQGTKLEIKGGGGSGGGGSGGGGSGGGGSQIQLVQSGAEVKKPGASVKVSCKASGYIFTNYGMNWVRQAPGQRLEWMGWINTYTGESTYSADFKGRVTITLDTSASTAYMELSSLRSEDTAVYYCARSGGYDPMDYWGQGTTVTVSS

SEQ ID NO: 199 - protein, 249 aa, Artificial Sequence
  source: /note="Description of Artificial Sequence: Synthetic scFv sequence"
QIQLVQSGSELKKPGASVKVSCKASGYIFTNYGMNWVRQAPGQGLEWMGWINTYTGESTYSADFKGRFVFSLDTSVSTAYLQINALKAEDTAVYYCARSGGYDPMDYWGQGTTVTVSSGGGGSGGGGSGGGGSGGGGSDIVLTQSPDSLAVSLGERATINCRASESVDNYGNTFMHWYQQKPGQPPKLLIYRASNLESGVPDRFSGSGSRTDFTLTISSLQAEDVAVYYCQQSNEDPPTFGQGTKLEIK

SEQ ID NO: 200 - protein, 249 aa, Artificial Sequence
  source: /note="Description of Artificial Sequence: Synthetic scFv sequence"
QIQLVQSGSELKKPGASVKVSCKASGYIFTNYGMNWVRQAPGQGLEWMGWINTYTGESTYSADFKGRFVFSLDTSVSTAYLQINALKAEDTAVYYCARSGGYDPMDYWGQGTTVTVSSGGGGSGGGGSGGGGSGGGGSEIVLTQSPATLSLSPGERATLSCRASESVDNYGNTFMHWYQQKPGQAPRLLIYRASNLESGIPARFSGSGSRTDFTLTISSLEPEDVAVYYCQQSNEDPPTFGQGTKLEIK

SEQ ID NO: 201 - protein, 249 aa, Artificial Sequence
  source: /note="Description of Artificial Sequence: Synthetic scFv sequence"
QIQLVQSGAEVKKPGASVKVSCKASGYIFTNYGMNWVRQAPGQRLEWMGWINTYTGESTYSADFKGRVTITLDTSASTAYMELSSLRSEDTAVYYCARSGGYDPMDYWGQGTTVTVSSGGGGSGGGGSGGGGSGGGGSDIVLTQSPDSLAVSLGERATINCRASESVDNYGNTFMHWYQQKPGQPPKLLIYRASNLESGVPDRFSGSGSRTDFTLTISSLQAEDVAVYYCQQSNEDPPTFGQGTKLEIK

SEQ ID NO: 202 - protein, 249 aa, Artificial Sequence
  source: /note="Description of Artificial Sequence: Synthetic scFv sequence"
QIQLVQSGAEVKKPGASVKVSCKASGYIFTNYGMNWVRQAPGQRLEWMGWINTYTGESTYSADFKGRVTITLDTSASTAYMELSSLRSEDTAVYYCARSGGYDPMDYWGQGTTVTVSSGGGGSGGGGSGGGGSGGGGSEIVLTQSPATLSLSPGERATLSCRASESVDNYGNTFMHWYQQKPGQAPRLLIYRASNLESGIPARFSGSGSRTDFTLTISSLEPEDVAVYYCQQSNEDPPTFGQGTKLEIK

SEQ ID NO: 203 - protein, 247 aa, Artificial Sequence
  source: /note="Description of Artificial Sequence: Synthetic scFv sequence"
DIQMTQSTSSLSASLGDRVTISCSASQGINNYLNWYQQKPDGTVELLIYYTSTLQSGVPSRFSGSGSGTDYSLTISNLEPEDIGTYYCQQYSKLPRTFGGGTKLEIKGSTSGSGKPGSSEGSTKGQVQLQQSGSELMMPGASVKISCKATGYTFSNYWIEWVKQRPGHGLEWIGEILPGTGRTIYNEKFKGKATFTADISSNTVQMQLSSLTSEDSAVYYCARRDYYGNFYYAMDYWGQGTSVTVSS

SEQ ID NO: 204 - protein, 242 aa, Artificial Sequence
  source: /note="Description of Artificial Sequence: Synthetic scFv sequence"
DIQMTQTTSSLSASLGDRVTISCRASQDISKYLNWYQQKPDGTVKLLIYHTSRLHSGVPSRFSGSGSGTDYSLTISNLEQEDIATYFCQQGNTLPYTFGGGTKLEITGGGGSGGGGSGGGGSEVKLQESGPGLVAPSQSLSVTCTVSGVSLPDYGVSWIRQPPRKGLEWLGVIWGSETTYYNSALKSRLTIIKDNSKSQVFLKMNSLQTDDTAIYYCAKHYYYGGSYAMDYWGQGTSVTVSS

SEQ ID NO: 205 - DNA, 726 bp, Artificial Sequence
  source: /note="Description of Artificial Sequence: Synthetic scFv sequence"
gacatccagatgacacagaccacaagctccctgtccgcctctctgggcgacagagtgaccatcagctgccgggcctcccaggatatctctaagtatctgaactggtaccagcagaagcccgatggcacagtgaagctgctgatctatcacaccagccgcctgcactccggagtgccttctaggttcagcggctccggctctggcacagactacagcctgaccatctccaacctggagcaggaggatatcgccacctatttctgccagcagggcaatacactgccttacacctttggcggcggcacaaagctggagatcaccggaggaggaggcagcggaggaggaggctccggcggcggcggctctgaggtgaagctgcaggagtccggaccaggcctggtggcacctagccagtccctgtctgtgacatgtaccgtgtccggcgtgtctctgccagactacggcgtgtcttggatcaggcagccacctaggaagggcctggagtggctgggcgtgatctggggcagcgagacaacatactataattctgccctgaagagcagactgacaatcatcaaggacaacagcaagtcccaggtgttcctgaagatgaatagcctgcagacagacgataccgccatctactattgcgccaagcactactattacggcggcagctatgccatggattactggggccagggcacatccgtgaccgtgtctagc

SEQ ID NO: 206 - DNA, 726 bp, Artificial Sequence
  source: /note="Description of Artificial Sequence: Synthetic scFv sequence"
gacatccagatgacacagaccacaagctccctgagcgcctccctgggcgacagagtgaccatctcttgccgggccagccaggatatctccaagtatctgaactggtaccagcagaagcccgatggcacagtgaagctgctgatctatcacacctctcgcctgcacagcggcgtgccttccaggttctctggcagcggctccggcacagactactctctgaccatcagcaacctggagcaggaggatatcgccacctatttctgccagcagggcaatacactgccctacacctttggcggcggcacaaagctggagatcaccggcggcggcggctctggaggaggaggcagcggcggaggaggctccgaggtgaagctgcaggagtccggaccaggcctggtggcaccatctcagagcctgtccgtgacatgtaccgtgagcggcgtgtccctgcctgactacggcgtgagctggatcagacagccacctaggaagggcctggagtggctgggcgtgatctggggctccgagacaacatactataactccgccctgaagtctcggctgaccatcatcaaggacaactctaagagccaggtgttcctgaagatgaattccctgcagacagacgataccgccatctactattgcgccaagcactactattacggcggctcctatgccatggattactggggccagggcacatctgtgaccgtgtctagc

SEQ ID NO: 207 - DNA, 726 bp, Artificial Sequence
  source: /note="Description of Artificial Sequence: Synthetic scFv sequence"
gacatccagatgacacagaccacaagctccctgagcgcctccctgggcgacagagtgaccatcagctgccgggcctcccaggatatctctaagtatctgaactggtaccagcagaagccagatggcacagtgaagctgctgatctatcacaccagccgcctgcactccggagtgccctctaggttctctggcagcggctccggcacagactacagcctgaccatctccaacctggagcaggaggatatcgccacctatttctgccagcagggcaatacactgccatacacctttggcggcggcacaaagctggagatcaccggaggaggaggcagcggaggaggaggctccggcggcggcggctctgaggtgaagctgcaggagtccggaccaggcctggtggcaccttctcagagcctgtccgtgacatgtaccgtgtctggcgtgagcctgcccgactacggcgtgtcttggatcagacagccacctaggaagggcctggagtggctgggcgtgatctggggcagcgagacaacatactataattctgccctgaagagcaggctgaccatcatcaaggacaactctaagagccaggtgttcctgaagatgaattccctgcagacagacgataccgccatctactattgcgccaagcactactattacggcggctcttatgccatggattactggggccagggcacaagcgtgaccgtgtctagc

SEQ ID NO: 208 - DNA, 726 bp, Artificial Sequence
  source: /note="Description of Artificial Sequence: Synthetic scFv sequence"
gacatccagatgacacagaccacaagctccctgagcgcctccctgggcgacagagtgaccatctcttgccgggccagccaggatatctccaagtatctgaactggtaccagcagaagccagatggcacagtgaagctgctgatctatcacacctctcgcctgcacagcggagtgccctccaggttctctggcagcggctccggcacagactactctctgaccatcagcaacctggagcaggaggatatcgccacctatttctgccagcagggcaatacactgccctacacctttggcggcggcacaaagctggagatcaccggcggcggcggctctggaggaggaggcagcggcggaggaggctccgaggtgaagctgcaggagtccggaccaggcctggtggcaccatctcagagcctgtccgtgacatgtaccgtgagcggcgtgtccctgcctgactacggcgtgagctggatcagacagccacctaggaagggcctggagtggctgggcgtgatctggggctccgagacaacatactataattccgccctgaagtctcggctgacaatcatcaaggacaactctaagagccaggtgtttctgaagatgaatagcctgcagacagacgataccgccatctactattgcgccaagcactactattacggcggctcctatgccatggattactggggccagggcacatctgtgaccgtgtctagc

SEQ ID NO: 209 - DNA, 726 bp, Artificial Sequence
  source: /note="Description of Artificial Sequence: Synthetic scFv sequence"
gacatccagatgacacagaccacaagctccctgagcgcctccctgggcgacagagtgaccatcagctgccgggcctcccaggatatctctaagtatctgaactggtaccagcagaagccagatggcacagtgaagctgctgatctatcacaccagccgcctgcactccggagtgccctctaggttctctggcagcggctccggcacagactacagcctgaccatctccaacctggagcaggaggatatcgccacctatttctgccagcagggcaatacactgccatacacctttggcggcggcacaaagctggagatcaccggaggaggaggcagcggaggaggaggctccggcggcggcggctctgaggtgaagctgcaggagtccggaccaggcctggtggcaccttctcagagcctgtccgtgacatgtaccgtgtctggcgtgagcctgcccgactacggcgtgtcttggatcagacagccacctaggaagggcctggagtggctgggcgtgatctggggcagcgagacaacatactataattctgccctgaagagcaggctgacaatcatcaaggacaactctaagagccaggtgtttctgaagatgaatagcctgcagacagacgataccgccatctactattgtgccaagcactactattacggcggcagctatgccatggattactggggccagggcacatccgtgaccgtgtctagc

SEQ ID NO: 210 - DNA, 726 bp, Artificial Sequence
  source: /note="Description of Artificial Sequence: Synthetic scFv sequence"
gacatccagatgacacagactacatcctccctgtctgcctctctgggagacagagtcaccatcagttgcagggcaagtcaggacattagtaaatatttaaattggtatcagcagaaaccagatggaactgttaaactcctgatctaccatacatcaagattacactcaggagtcccatcaaggttcagtggcagtgggtctggaacagattattctctcaccattagcaacctggagcaagaagatattgccacttacttttgccaacagggtaatacgcttccgtacacgttcggaggggggaccaagctggagatcacaggtggcggtggctcgggcggtggtgggtcgggtggcggcggatctgaggtgaaactgcaggagtcaggacctggcctggtggcgccctcacagagcctgtccgtcacatgcactgtctcaggggtctcattacccgactatggtgtaagctggattcgccagcctccacgaaagggtctggagtggctgggagtaatatggggtagtgaaaccacatactataattcagctctcaaatccagactgaccatcatcaaggacaactccaagagccaagttttcttaaaaatgaacagtctgcaaactgatgacacagccatttactactgtgccaaacattattactacggtggtagctatgctatggactactggggccaaggaacctcagtcaccgtctcctca

SEQ ID NO: 211 - DNA, 726 bp, Artificial Sequence
  source: /note="Description of Artificial Sequence: Synthetic scFv sequence"
gatatccagatgacacagaccacaagctccctgtccgcctctctgggcgacagagtgaccatcagctgccgggcctcccaggatatctctaagtatctgaactggtaccagcagaagcccgatggcacagtgaagctgctgatctatcacaccagccgcctgcactccggagtgccttctaggttcagcggctccggctctggcacagactacagcctgaccatctccaacctggagcaggaggatatcgccacctatttctgccagcagggcaatacactgccttacacctttggcggcggcacaaagctggagatcaccggaggaggaggcagcggaggaggaggctccggcggcggcggctctgaggtgaagctgcaggagtccggaccaggcctggtggcacctagccagtccctgtctgtgacatgtaccgtgtccggcgtgtctctgccagactacggcgtgtcttggatcaggcagccacctaggaagggcctggagtggctgggcgtgatctggggcagcgagacaacatactataattctgccctgaagagcagactgacaatcatcaaggacaacagcaagtcccaggtgttcctgaagatgaatagcctgcagacagacgataccgccatctactattgcgccaagcactactattacggcggcagctatgccatggattactggggccagggcacatccgtgaccgtgtctagc

SEQ ID NO: 212 - protein, 247 aa, Artificial Sequence
  source: /note="Description of Artificial Sequence: Synthetic scFv sequence"
DIQMTQTTSSLSASLGDRVTISCRASQDISKYLNWYQQKPDGTVKLLIYHTSRLHSGVPSRFSGSGSGTDYSLTISNLEQEDIATYFCQQGNTLPYTFGGGTKLEITGGSGSGNWSHPQFEKGSGSGEVKLQESGPGLVAPSQSLSVTCTVSGVSLPDYGVSWIRQPPRKGLEWLGVIWGSETTYYNSALKSRLTIIKDNSKSQVFLKMNSLQTDDTAIYYCAKHYYYGGSYAMDYWGQGTSVTVSS

SEQ ID NO: 213 - protein, 245 aa, Artificial Sequence
  source: /note="Description of Artificial Sequence: Synthetic scFv sequence"
DIQMTQTTSSLSASLGDRVTISCRASQDISKYLNWYQQKPDGTVKLLIYHTSRLHSGVPSRFSGSGSGTDYSLTISNLEQEDIATYFCQQGNTLPYTFGGGTKLEITGSTSGSGKPGSGEGSTKGEVKLQESGPGLVAPSQSLSVTCTVSGVSLPDYGVSWIRQPPRKGLEWLGVIWGSETTYYNSALKSRLTIIKDNSKSQVFLKMNSLQTDDTAIYYCAKHYYYGGSYAMDYWGQGTSVTVSS

SEQ ID NO: 214 - protein, 439 aa, Artificial Sequence
  source: /note="Description of Artificial Sequence: Synthetic scFv sequence"
DIQMTQTTSSLSASLGDRVTISCRASQDISKYLNWYQQKPDGTVKLLIYHTSRLHSGVPSRFSGSGSGTDYSLTISNLEQEDIATYFCQQGNTLPYTFGGGTKLEITGSTSGSGKPGSGEGSTKGEVKLQESGPGLVAPSQSLSVTCTVSGVSLPDYGVSWIRQPPRKGLEWLGVIWGSETTYYNSALKSRLTIIKDNSKSQVFLKMNSLQTDDTAIYYCAKHYYYGGSYAMDYWGQGTSVTVSSESKYGPPCPPCPMFWVLVVVGGVLACYSLLVTVAFIIFWVKRGRKKLLYIFKQPFMRPVQTTQEEDGCSCRFEEEEGGCELRVKFSRSADAPAYQQGQNQLYNELNLGRREEYDVLDKRRGRDPEMGGKPRRKNPQEGLYNELQKDKMAEAYSEIGMKGERRRGKGHDGLYQGLSTATKDTYDALHMQALPPRL

SEQ ID NO: 215 - protein, 250 aa, Artificial Sequence
  source: /note="Description of Artificial Sequence: Synthetic scFv sequence"
DIQMTQTTSSLSASLGDRVTISCRASQDISKYLNWYQQKPDGTVKLLIYHTSRLHSGVPSRFSGSGSGTDYSLTISNLEQEDIATYFCQQGNTLPYTFGGGTKLEITKAGGGGSGGGGSGGGGSGGGGSEVKLQESGPGLVAPSQSLSVTCTVSGVSLPDYGVSWIRQPPRKGLEWLGVIWGSETTYYNSALKSRLTIIKDNSKSQVFLKMNSLQTDDTAIYYCAKHYYYGGSYAMDYWGQGTSVTVSSD

SEQ ID NO: 216 - protein, 438 aa, Artificial Sequence
  source: /note="Description of Artificial Sequence: Synthetic scFv sequence"
DIQMTQTTSSLSASLGDRVTISCRASQDISKYLNWYQQKPDGTVKLLIYHTSRLHSGVPSRFSGSGSGTDYSLTISNLEQEDIATYFCQQGNTLPYVKLQESGPGLVAPSQSLSVTCTVSGVSLPDYGVSWIRQPPRKGLEWLGVIWGSETTYYNSALKSRLTIIKDNSKSQVFLKMNSLQTDDTAIYYCAKHYYYGGSYAMDYWGQGTSVTVSSTTTPAPRPPTPAPTIASQPLSLRPEACRPAAGGAVHTRGLDFACDIYIWAPLAGTCGVLLLSLVITLYCKRGRKKLLYIFKQPFMRPVQTTQEEDGCSCRFPEEEEGGCELRVKFSRSADAPAYKQGQNQLYNELNLGRREEYDVLDKRRGRDPEMGGKPRRKNPQEGLYNELQKDKMAEAYSEIGMKGERRRGKGHDGLYQGLSTATKDTYDALHMQALPPR

SEQ ID NO: 217 - protein, 247 aa, Artificial Sequence
  source: /note="Description of Artificial Sequence: Synthetic scFv sequence"
EIVMTQSPATLSLSPGERATLSCRASQDISKYLNWYQQKPGQAPRLLIYHTSRLHSGIPARFSGSGSGTDYTLTISSLQPEDFAVYFCQQGNTLPYTFGQGTKLEIKGGGGSGGGGSGGGGSGGGGSQVQLQESGPGLVKPSETLSLTCTVSGVSLPDYGVSWIRQPPGKGLEWIGVIWGSETTYYQSSLKSRVTISKDNSKNQVSLKLSSVTAADTAVYYCAKHYYYGGSYAMDYWGQGTLVTVSS

SEQ ID NO: 218 - protein, 247 aa, Artificial Sequence
  source: /note="Description of Artificial Sequence: Synthetic scFv sequence"
EIVMTQSPATLSLSPGERATLSCRASQDISKYLNWYQQKPGQAPRLLIYHTSRLHSGIPARFSGSGSGTDYTLTISSLQPEDFAVYFCQQGNTLPYTFGQGTKLEIKGGGGSGGGGSGGGGSGGGGSQVQLQESGPGLVKPSETLSLTCTVSGVSLPDYGVSWIRQPPGKGLEWIGVIWGSETTYYSSSLKSRVTISKDNSKNQVSLKLSSVTAADTAVYYCAKHYYYGGSYAMDYWGQGTLVTVSS

SEQ ID NO: 219 - protein, 251 aa, Artificial Sequence
  source: /note="Description of Artificial Sequence: Synthetic scFv sequence"
EVQLQQSGPELIKPGASVKMSCKASGYTFTSYVMHWVKQKPGQGLEWIGYINPYNDGTKYNEKFKGKATLTSDKSSSTAYMELSSLTSEDSAVYYCARGTYYYGSRVFDYWGQGTTLTVSSGGGGSGGGGSGGGGSDIVMTQAAPSIPVTPGESVSISCRSSKSLLNSNGNTYLYWFLQRPGQSPQLLIYRMSNLASGVPDRFSGSGSGTAFTLRISRVEAEDVGVYYCMQHLEYPFTFGAGTKLELKRAD

SEQ ID NO: 220 - protein, 252 aa, Artificial Sequence
  source: /note="Description of Artificial Sequence: Synthetic scFv sequence"
EVQLQQSGPELIKPGASVKMSCKASGYTFTSYVMHWVKQKPGQGLEWIGYINPYNDGTKYNEKFKGKATLTSDKSSSTAYMELSSLTSEDSAVYYCARGTYYYGSRVFDYWGQGTTLTVSSGGGGSGGGGSGGGGSDIVMTQAAPSIPVTPGESVSISCRSSKSLLNSNGNTYLYWFLQRPGQSPQLLIYRMSNLASGVPDRFSGSGSGTAFTLRISRVEAEDVGVYYCMQHLEYPFTFGAGTKLELKRSDP

SEQ ID NO: 221 - protein, 251 aa, Artificial Sequence
  source: /note="Description of Artificial Sequence: Synthetic scFv sequence"
EVQLVESGGGLVQPGRSLRLSCAASGFTFDDYAMHWVRLAPGKGLEWVSGISWNSGRIGYADSVKGRFTISRDNAKNSLFLQMNSLRAKDTAVYYCARDQGYHYYDSAEHAFDIWGQGTMVTVSSGGGGSGGGGSGGGGSQSVLTQPRSVSGSPGQSVTISCTGPISGVGDYTSVSWYQHYPGKTPKLIIYDVTQRPSGVPNRFSGSKSGNTASLTISGLQADDEADYYCCSYEAPTHTYVFGTGTKLTVL

SEQ ID NO: 222 - protein, 251 aa, Artificial Sequence
  source: /note="Description of Artificial Sequence: Synthetic scFv sequence"
EVQLVESGGGLVQPGRSLRLSCAASGFTFDDYAMHWVRQAPGKGLEWVSGISWNSGRIGYADSVKGRFTISRDNAKNSLFLQMNSLRAEDTAVYYCARDQGYHYYDSAEHAFDIWGQGTMVTVSSGGGGSGGGGSGGGGSQAVLTQPRSVSGSPGQSVTISCTGISSGVDSHRYVSWYQHHPGKAPKLMIYDFSKRPSGVPDRFSGSKSGNTASLTISGLQAEDEADYYCCSYAAISPNYVFGTGTKLTVL

SEQ ID NO: 223 - protein, 251 aa, Artificial Sequence
  source: /note="Description of Artificial Sequence: Synthetic scFv sequence"
EVQLVESGGGLVQPGRSLRLSCAASGFTFDDYAMHWVRQAPGKGLEWVSGISWNSGRIGYADSVKGRFTISRDNAKNSLFLQMNSLRAEDTAVYYCARDQGYHYYDSAEHAFDIWGQGTMVTVSSGGGGSGGGGSGGGGSQLVLTQPPSVSGSPGQSVTFSCTGASSDVGGYDHVSWYQHHPGKGPKLLIYDVSKRPSGVPDRFSGSKSGNTASLTISGLQAEDEADYYCCSFAGYYTYWLFGGGTKVTVL

SEQ ID NO: 224 - protein, 250 aa, Artificial Sequence
  source: /note="Description of Artificial Sequence: Synthetic scFv sequence"
EVQLVESGGGLVQPGRSLRLSCAASGFTFDDYAMHWVRQAPGKGLEWVSGISWNSGRIGYADSVKGRFTISRDNAKNSLFLQMNSLRAEDTAVYYCARDQGYHYYDSAEHAFDIWGQGTMVTVSSGGGGSGGGGSGGGGSQSALTQPASVSGSPGQSITIFCTGTSSDVGGYNYVSWYQQLPGTAPKLLIYSNNQRPSGVPDRFSGSKSGTSASLAISGLRSEDEADYYCAAWDDSLSVVFGGGTKLTVL

SEQ ID NO: 225 - protein, 251 aa, Artificial Sequence
  source: /note="Description of Artificial Sequence: Synthetic scFv sequence"
EVQLVESGGGLVQPGRSLRLSCAASGFTFDDYAMHWVRQAPGKGLEWVSGISWNSGRIGYADSVKGRFTISRDNAKNSLFLQMNSLRAEDTAVYYCARDQGYHYYDSAEHAFDIWGQGTMVTVSSGGGGSGGGGSGGGGSQSALTQPASVSGSPGQSITISCTGTSSDVGAYNFVSWYQQLPGTAPKFLIYDNNKRPPGIPDRFSGSKSGTSATLGITGLQTGDEADYYCATWDSGLSAVVFGGGTKLTVL

SEQ ID NO: 226 - protein, 248 aa, Artificial Sequence
  source: /note="Description of Artificial Sequence: Synthetic scFv sequence"
EVQLVESGGGLVQPGRSLRLSCAASGFTFDDYAMHWVRQAPGKGLEWVSGISWNSGRIGYADSVKGRFTISRDNAKNSLFLQMNSLRAEDTAVYYCARDQGYHYYDSAEHAFDIWGQGTMVTVSSGGGGSGGGGSGGGGSSYELTQDPAVSVALGQTVRITCQGDSLRSYYASWYQQKPGQAPVLVIYDKNNRPSGIPDRFSGSSSGNTASLTITGAQAEDEADYYCNSRDSSGNNWVFGGGTKLTVL

SEQ ID NO: 227 - protein, 236 aa, Artificial Sequence
  source: /note="Description of Artificial Sequence: Synthetic scFv sequence"
EVQLVESGGGLVQPGRSLRLSCAASGFTFDDYAMHWVRQAPGKGLEWVSGISWNSGRIGYADSVKGRFTISRDNAKNSLFLQMNSLRAEDTAVYYCARDQGYHYYDSAEHAFDIWGQGTMVTVSSQSVLTQPRSLSGSPGQSVTIACTGASTDVGGYNYVSWYQQHPGKAPKLMIYDVNKRPSGVPDRFSGSKSGNTAFLTISGLQAEDEADYYCCSYAGSYTFEVFGGGTKLTVL

SEQ ID NO: 228 - protein, 252 aa, Artificial Sequence
  source: /note="Description of Artificial Sequence: Synthetic scFv sequence"
EVQLVESGGGLVQPGRSLRLSCAASGFTFDDYAMHWVRQAPGKGLEWVSGISWNSGRIGYADSVKGRFTISRDNAKNSLFLQMNSLRAEDTAVYYCARDQGYHYYDSAEHAFDIWGQGTVVTVSSGGGGSGGGGSGGGGSQSALTQPASVSGSPGQSITISCTGTSSDLGGYNYVSWYQHRPGKAPKLIIYDVTVRPSGVSDRFSGSKSGNTASLTISGLQAEDEADYYCGSYTSSSTLLWVFGGGTKLTVL

SEQ ID NO: 229 - protein, 246 aa, Artificial Sequence
  source: /note="Description of Artificial Sequence: Synthetic scFv sequence"
EVQLVESGGGLVQPGRSLRLSCAASGFTFDDYAMHWVRQAPGKGLEWVSGISWNSGRIGYADSVKGRFTISRDNAKNSLFLQMNSLRAEDTAVYYCARDQGYHYYDSAEHAFDIWGQGTVVTVSSGGGGSGGGGSGGGGSQSALTQPRSVSGFPGQSVTISCTGTTSDDVSWYQQHPGKAPQLMLYDVSKRPSGVPHRFSGSRSGRAASLIISGLQTEDEADYFCCSYAGRYNSVLFGGGTKLTVL

SEQ ID NO: 230 - protein, 246 aa, Artificial Sequence
  source: /note="Description of Artificial Sequence: Synthetic scFv sequence"
EVQLVESGGGLVQPGRSLRLSCAASGFTFDDYAMHWVRQAPGKGLEWVSGISWNSGRIGYADSVKGRFTISRDNAKNSLFLQMNSLRAEDTAVYYCARDQGYHYYDSAEHAFDIWGQGTVVTVSSGGGGSGGGGSGGGGSQSALTQPRSVSGFPGQSVTISCTGTTSDDVSWYQQHPGKAPQLMLYDVSKRPSGVPHRFSGSRSGRAASLIISGLQTEDEADYFCCSYAGRYNSVPFGGGTKLTVL

SEQ ID NO: 231 - protein, 246 aa, Artificial Sequence
  source: /note="Description of Artificial Sequence: Synthetic scFv sequence"
EVQLVESGGGLVQPGRSLRLSCAASGFTFDDYAMHWVRQAPGKGLEWVSGISWNSGRIGYADSVKGRFTISRDNAKNSLFLQMNSLRAEDTAVYYCARDQGYHYYDSAEHAFDIWGQGTVVTVSSGGGGSGGGGSGGGGSQSALTQPRSVSGFPGQSVTISCTGTTSDDVSWYQQHPGKAPQLMLYDVSKRPSGVPHRFSGSRSGRAASLIISGLQTEDEADYFCSSYAGRYNSVLFGGGTKLTVL

SEQ ID NO: 232 - protein, 249 aa, Artificial Sequence
  source: /note="Description of Artificial Sequence: Synthetic scFv sequence"
EVQLVESGGGLVQPGRSLRLSCAASGFTFDDYAMHWVRQAPGKGLEWVSGISWNSGRIGYADSVKGRFTISRDNAKNSLFLQMNSLRAEDTAVYYCARDQGYHYYDSAEHAFDIWGQGTVVTVSSGGGGSGGGGSGGGGSQSVLTQPPSVSAAPGQEVTISCSGSSSNIGNNYVSWYQQLPGTAPKLLIYDNDKRPSGIPDRFSGSKSGTSATLGITGLQTGDEADYYCGTWDGNLSAVFGGGTKVTVL

SEQ ID NO: 233 - protein, 251 aa, Artificial Sequence
  source: /note="Description of Artificial Sequence: Synthetic scFv sequence"
EVQLVESGGGLVQPGRSLRLSCAASGFTFDDYAMHWVRQAPGKGLEWVSGISWNSGRIGYADSVKGRFTISRDNAKNSLFLQMNSLRAEDTAVYYCARDQGYHYYDSAEHAFDIWGQGTVVTVSSGGGGSGGGGSGGGGSQSVLTQPPSVSAAPGQKVTISCSGSSSNIGNNYVSWYQQLPGTAPKLLIYDNNKRPSGIPDRFSGSKSGTSATLGITGLQTGDEADYYCGTWDSSLNRDWVFGGGTKLTVL

SEQ ID NO: 234 - protein, 250 aa, Artificial Sequence
  source: /note="Description of Artificial Sequence: Synthetic scFv sequence"
EVQLVESGGGLVQPGRSLRLSCAASGFTFDDYAMHWVRQAPGKGLEWVSGISWNSGRIGYADSVKGRFTISRDNAKNSLFLQMNSLRAEDTAVYYCARDQGYHYYDSAEHAFDIWGQGTVVTVSSGGGGSGGGGSGGGGSQSVLTQPPSVSAAPGQKVTISCSGSSSNIGNNYVSWYQQLPGTAPKLLIYDNNKRPSGIPDRFSGSKSGTSATLGITGLQTGDEGDYYCGTWDISLRFGVFGGGTKVTVL

SEQ ID NO: 235 - protein, 249 aa, Artificial Sequence
  source: /note="Description of Artificial Sequence: Synthetic scFv sequence"
EVQLVQSGGGLVQPGRSLRLSCAASGFTFDDYAMHWVRQAPGKGLEWVSGISWNSGSIGYADSVKGRFTISRDNAKNSLYLQMNSLRAEDTAVYYCARDQGYHYYDSAEHAFDIWGQGTVVTVSSGGGGSGGGGSGGGGSAIRMTQSPSSLSASVGDRVTVTCQASQDISNYLNWYQQKPGRAPKLLIYDASNVKAGVPSRFSGGGSGTDFTLTISSLQPEDFATYYCQQSYSTPQAYTFGQGTKLDIK

SEQ ID NO: 236 - protein, 247 aa, Artificial Sequence
  source: /note="Description of Artificial Sequence: Synthetic scFv sequence"
EVQLVQSGGGLVQPGRSLRLSCAASGFTFDDYAMHWVRQAPGKGLEWVSGISWNSGSIGYADSVKGRFTISRDNAKNSLYLQMNSLRAEDTAVYYCARDQGYHYYDSAEHAFDIWGQGTVVTVSSGGGGSGGGGSGGGGSDIQLTQSPSTLSASVGDRVTITCRASQSISRWLAWYQQKPGKAPKLLIYDASNLETGVPSRFSGSGSGTDFTFTISSLQPEDIATYYCQQYDNLPLTFGGGTKVEIK

SEQ ID NO: 237 - protein, 249 aa, Artificial Sequence
  source: /note="Description of Artificial Sequence: Synthetic scFv sequence"
EVQLVQSGGGLVQPGRSLRLSCAASGFTFDDYAMHWVRQAPGKGLEWVSGISWNSGSIGYADSVKGRFTISRDNAKNSLYLQMNSLRAEDTAVYYCARDQGYHYYDSAEHAFDIWGQGTVVTVSSGGGGSGGGGSGGGGSEIVLTQSPATLSLSPGETATLSCRASQSINHYLAWYQQKPGQAPRLLIYDASNRATGIPARFSGSGSGTDFTLTISSLEPEDFATYYCQQSYSHPRMYTFGQGTKLDIK

SEQ ID NO: 238 - protein, 270 aa, Artificial Sequence
  source: /note="Description of Artificial Sequence: Synthetic scFv sequence"
MALPVTALLLPLALLLHAARPEVKLQESGPGLVAPSQSLSVTCTVSGVSLPDYGVSWIRQPPRKGLEWLGVIWGSETTYYNSALKSRLTIIKDNSKSQVFLKMNSLQTDDTAIYYCAKHYYYGGSYAMDYWGQGTSVTVSSGGGGSGGGGSGGGGSDIQMTQTTSSLSASLGDRVTISCRASQDISKYLNWYQQKPDGTVKLLIYHTSRLHSGVPSRFSGSGSGTDYSLTISNLEQEDIATYFCQQGNTLPYTFGGGTKLEITRSDPTSS

SEQ ID NO: 239 - protein, 267 aa, Artificial Sequence
  source: /note="Description of Artificial Sequence: Synthetic scFv sequence"
MALPVTALLLPLALLLHAARPEVQLQQSGPDLVKPGASVKISCKASGYSFTGYYMHWVKQSHGKSLEWIGRINPNNGVTLYNQKFKDKAILTVDKSSTTAYMELRSLTSEDSAVYYCARSTMITNYVMDYWGQVTSVTVSSGGGGSGGGGSGGGGSSIVMTQTPTFLLVSAGDRVTITCKASQSVSNDVAWYQQKPGQSPTLLISYTSSRYAGVPDRFIGSGYGTDFTFTISTLQAEDLAVYFCQQDYNSPPTFGGGTKLEIKRSDP

SEQ ID NO: 240 - protein, 272 aa, Artificial Sequence
  source: /note="Description of Artificial Sequence: Synthetic scFv sequence"
MALPVTALLLPLALLLHAARPEVQLQQSGPELIKPGASVKMSCKASGYTFTSYVMHWVKQKPGQGLEWIGYINPYNDGTKYNEKFKGKATLTSDKSSSTAYMELSSLTSEDSAVYYCARGTYYYGSRVFDYWGQGTTLTVSSGGGGSGGGGSGGGGSDIVMTQAAPSIPVTPGESVSISCRSSKSLLNSNGNTYLYWFLQRPGQSPQLLIYRMSNLASGVPDRFSGSGSGTAFTLRISRVEAEDVGVYYCMQHLEYPFTFGAGTKLELKRSD

SEQ ID NO: 241 - protein, 273 aa, Artificial Sequence
  source: /note="Description of Artificial Sequence: Synthetic scFv sequence"
MALPVTALLLPLALLLHAARPEVQLQQSGPELIKPGASVKMSCKASGYTFTSYVMHWVKQKPGQGLEWIGYINPYNDGTKYNEKFKGKATLTSDKSSSTAYMELSSLTSEDSAVYYCARGTYYYGSRVFDYWGQGTTLTVSSGGGGSGGGGSGGGGSDIVMTQAAPSIPVTPGESVSISCRSSKSLLNSNGNTYLYWFLQRPGQSPQLLIYRMSNLASGVPDRFSGSGSGTAFTLRISRVEAEDVGVYYCMQHLEYPFTFGAGTKLELKRSDP

SEQ ID NO: 242 - protein, 277 aa, Artificial Sequence
  source: /note="Description of Artificial Sequence: Synthetic scFv sequence"
MAPAMESPTLLCVALLFFAPDGVLAEVQLQQSGPELIKPGASVKMSCKASGYTFTSYVMHWVKQKPGQGLEWIGYINPYNDGTKYNEKFKGKATLTSDKSSSTAYMELSSLTSEDSAVYYCARGTYYVGSRVFDYWGQGTTLTVSSGGGGSGGGGSGGGGSDIVMTQAAPSIPVTPGESVSISCRSSKSLLNSNGNTYLYWFLQRPGQSPQLLIYRMSNLASGVPDRFSGSGSGTAFTLRISRVEAEDVGVYVCMQHLEYPFTFGAGTKLELKRSDP

SEQ ID NO: 243 - protein, 277 aa, Artificial Sequence
  source: /note="Description of Artificial Sequence: Synthetic scFv sequence"
MAPAMESPTLLCVALLFFAPDGVLAEVQLQQSGPELIKPGASVKMSCKASGYTFTSYVMHWVKQKPGQGLEWIGYINPYNDGTKYNEKFKGKATLTSDKSSSTAYMELSSLTSEDSAVYYCARGTYYYGSRVFDYWGQGTTLTVSSGGGGSGGGGSGGGGSDIVMTQAAPSIPVTPGESVSISCRSSKSLLNSNGNTYLYWFLQRPGQSPQLLIYRMSNLASGVPDRFSGSGSGTAFTLRISRVEAEDVGVYYCMQHLEYPFTFGAGTKLELKRSDP

SEQ ID NO: 244 - protein, 495 aa, Artificial Sequence
  source: /note="Description of Artificial Sequence: Synthetic scFv sequence"
METDTLLLWVLLLWVPGSTGEVQLQQSGPELIKPGASVKMSCKASGYTFTSYVMHWVKQKPGQGLEWIGYINPYNDGTKYNEKFKGKATLTSDKSSSTAYMELSSLTSEDSAVYYCARGTYYYGSRVFDYWGQGTTLTVSSGGGGSGGGGSGGGGSDIVMTQAAPSIPVTPGESVSISCRSSKSLLNSNGNTYLYWFLQRPGQSPQLLIYRMSNLASGVPDRFSGSGSGTAFTLRISRVEAEDVGVYYCMQHLEYPFTFGAGTKLELKRSDPTTTPAPRPPTPAPTIASQPLSLRPEACRPAAGGAVHTRGLDFACDIYIWAPLAGTCGVLLLSLVITLYCKRGRKKLLYIFKQPFMRPVQTTQEEDGCSCRFPEEEEGGCELRVKFSRSADAPAYQQGQNQLYNELNLGRREEYDVLDKRRGRDPEMGGKPRRKNPQEGLYNELQKDKMAEAYSEIGMKGERRRGKGHDGLYQGLSTATKDTYDALHMQALPPR

SEQ ID NO: 245 - protein, 252 aa, Artificial Sequence
  source: /note="Description of Artificial Sequence: Synthetic scFv sequence"
QITLKESGPTLVKPTQTLTLTCTFSGFSLSTSGVGVGWIRQPPGKALEWLALIYWDDDKRYSPSLKSRLTITKDTSKNQVVLTMTNMDPVDTATYYCAHIDYGSGSYSPRTSYYYYMSVWGKGTTVTVSSGGGGSGGGGSGGGGSAIQLTQSPSFLSASVGDRVTITCRASQGISSYLNWYQQRAGKAPELLIYAASNLQSGVPSRFSGSGSGTDFTLTITSVQPEDFATYFCQQGDAFPLTFGPGTKVTIR

SEQ ID NO: 246 - protein, 249 aa, Artificial Sequence
  source: /note="Description of Artificial Sequence: Synthetic scFv sequence"
QMQLVQSGGGLVQPGRSLRLSCAASGFTFDDYAMHWVRQAPGKGLEWVSGISWNSGSIGYADSVKGRFTISRDNAKNSLYLQMNSLRAEDTAVYYCARDQGYHYYDSAEHAFDIWGQGTVVTVSSGGGGSGGGGSGGGGSAIRMTQSPSSLSASVGDRVTVTCQASQDISNYLNWYQQKPGRAPKLLIYDASNVKAGVPSRFSGGGSGTDFTLTISSLQPEDFATYYCQQSYSTPQAYTFGQGTKLEIK

SEQ ID NO: 247 - protein, 248 aa, Artificial Sequence
  source: /note="Description of Artificial Sequence: Synthetic scFv sequence"
QMQLVQSGGGLVQPGRSLRLSCAASGFTFDDYAMHWVRQAPGKGLEWVSGISWNSGSIGYADSVKGRFTISRDNAKNSLYLQMNSLRAEDTAVYYCARDQGYHYYDSAEHAFDIWGQGTVVTVSSGGGGSGGGGSGGGGSAIRMTQSPSTLSASVGDRVTITCRASQSISHYLAWYQQKPGKAPKLLIFDASRLASGVPSRFSGSGSGTDFTLTISSLQPEDFATYYCQQSYGAPMFTFGPGTRVDLK

SEQ ID NO: 248 - protein, 119 aa, Artificial Sequence
  source: /note="Description of Artificial Sequence: Synthetic scFv sequence"
QVQLLESGAELVRPGSSVKISCKASGYAFSSYWMNWVKQRPGQGLEWIGQIYPGDGDTNYNGKFKGQATLTADKSSSTAYMQLSGLTSEDSAVYSCARKTISSVVDFYFDYWGQGTTVT

SEQ ID NO: 249 - protein, 464 aa, Artificial Sequence
  source: /note="Description of Artificial Sequence: Synthetic scFv sequence"
QVQLLESGAELVRPGSSVKISCKASGYAFSSYWMNWVKQRPGQGLEWIGQIYPGDGDTNYNGKFKGQATLTADKSSSTAYMQLSGLTSEDSAVYSCARKTISSVVDFYFDYWGQGTTVTGGGSGGGSGGGSGGGSELVLTQSPKFMSTSVGDRVSVTCKASQNVGTNVAWYQQKPGQSPKPLIYSATYRNSGVPDRFTGSGSGTDFTLTITNVQSKDLADYFCQYNRYPYTSFFFTKLEIKRRSKIEVMYPPPYLDNEKSNGTIIHVKGKHLCPSPLFPGPSKPFWVLVVVGGVLACYSLLVTVAFIIFWVRSKRSRLLHSDYMNMTPRRPGPTRKHYQPYAPPRDFAAYRSRVKFSRSADAPAYQQGQNQLYNELNLGRREEYDVLDKRRGRDPEMGGKPRRKNPQEGLYNELQKDKMAEAYSEIGMKGERRRGKGHDGLYQGLSTATKDTYDALHMQALPPR

SEQ ID NO: 250 - protein, 242 aa, Artificial Sequence
  source: /note="Description of Artificial Sequence: Synthetic scFv sequence"
QVQLQESGPGLVKPSETLSLTCTVSGVSLPDYGVSWIRQPPGKGLEWIGVIWGSETTYYQSSLKSRVTISKDNSKNQVSLKLSSVTAADTAVYYCAKHYYYGGSYAMDYWGQGTLVTVSSGGGGSGGGGSGGGGSEIVMTQSPATLSLSPGERATLSCRASQDISKYLNWYQQKPGQAPRLLIYHTSRLHSGIPARFSGSGSGTDYTLTISSLQPEDFAVYFCQQGNTLPYTFGQGTKLEIK

SEQ ID NO: 251 - protein, 247 aa, Artificial Sequence
  source: /note="Description of Artificial Sequence: Synthetic scFv sequence"
QVQLQESGPGLVKPSETLSLTCTVSGVSLPDYGVSWIRQPPGKGLEWIGVIWGSETTYYQSSLKSRVTISKDNSKNQVSLKLSSVTAADTAVYYCAKHYYYGGSYAMDYWGQGTLVTVSSGGGGSGGGGSGGGGSGGGGSEIVMTQSPATLSLSPGERATLSCRASQDISKYLNWYQQKPGQAPRLLIYHTSRLHSGIPARFSGSGSGTDYTLTISSLQPEDFAVYFCQQGNTLPYTFGQGTKLEIK

SEQ ID NO: 252 - protein, 242 aa, Artificial Sequence
  source: /note="Description of Artificial Sequence: Synthetic scFv sequence"
QVQLQESGPGLVKPSETLSLTCTVSGVSLPDYGVSWIRQPPGKGLEWIGVIWGSETTYYSSSLKSRVTISKDNSKNQVSLKLSSVTAADTAVYYCAKHYYYGGSYAMDYWGQGTLVTVSSGGGGSGGGGSGGGGSEIVMTQSPATLSLSPGERATLSCRASQDISKYLNWYQQKPGQAPRLLIYHTSRLHSGIPARFSGSGSGTDYTLTISSLQPEDFAVYFCQQGNTLPYTFGQGTKLEIK

SEQ ID NO: 253 - protein, 241 aa, Artificial Sequence
  source: /note="Description of Artificial Sequence: Synthetic scFv sequence"
QVQLQQSGPELVKPGASVKISCKASGYAFSSSWMNWVKQRPGKGLEWIGRIYPGDEDTNYSGKFKDKATLTADKSSTTAYMQLSSLTSEDSAVYFCARSLLYGDYLDYWGQGTTLTVSSGGGGSGGGGSGGGGSQIVLTQSPAIMSASPGEKVTMTCSASSSVSYMHWYQQKSGTSPKRWIYDTSKLASGVPDRFSGSGSGTSYFLTINNMEAEDAATYYCQQWNINPLTFGAGTKLELKR

SEQ ID NO: 254 - protein, 251 aa, Artificial Sequence
  source: /note="Description of Artificial Sequence: Synthetic scFv sequence"
QVQLVESGGGLVQPGRSLRLSCAASGFTFDDYAMHWVRQAPGKGLEWVSGISWNSGRIGYADSVKGRFTISRDNAKNSLFLQMNSLRAEDTAVYYCARDQGYHYYDSAEHAFDIWGQGTMVTVSSGGGGSGGGGSGGGGSQAVLTQPRSVSGSPGQSVTISCTGISSGVDSHRYVSWYQHHPGKAPKLMIYDFSKRPSGVPDRFSGSKSGNTASLTISGLQAEDEADYYCSSYAAISPNYVFGTGTKLTVL

SEQ ID NO: 255 - protein, 239 aa, Artificial Sequence
  source: /note="Description of Artificial Sequence: Synthetic scFv sequence"
QVQLVESGGGLVQPGRSLRLSCAASGFTFDDYAMHWVRQAPGKGLEWVSGISWNSGRIGYADSVKGRFTISRDNAKNSLFLQMNSLRAEDTAVYYCARDQGYHYYDSAEHAFDIWGQGTMVTVSSGGGGSGGGGSGGGGSSYVLTQPPSASGTPGQRVTISCSGSSSNIGSNTVNWYQQFPGTAPKLLIYSNNQRPSGVPDRFSGSKSGTSASLAISGLQSEDEAEYYCAAWDDSLNVV

SEQ ID NO: 256 - protein, 250 aa, Artificial Sequence
  source: /note="Description of Artificial Sequence: Synthetic scFv sequence"
QVQLVESGGGLVQPGRSLRLSCAASGFTFDDYAMHWVRQAPGKGLEWVSGISWNSGRIGYADSVKGRFTISRDNAKNSLFLQMNSLRAEDTAVYYCARDQGYHYYDSAEHAFDIWGQGTVVTVSSGGGGSGGGGSGGGGSQSALTQPASVSGSPGHSITISCTGTRSDVGGFDYVSWYQHNPGKAPKLIIYDVTKRPSGVSNRFSGAKSGITASLTISGLQAEDEADYYCTSYRPGPTFVFGTGTKLDIK

SEQ ID NO: 257 - protein, 250 aa, Artificial Sequence
  source: /note="Description of Artificial Sequence: Synthetic scFv sequence"
QVQLVESGGGLVQPGRSLRLSCAASGFTFDDYAMHWVRQAPGKGLEWVSGISWNSGRIGYADSVKGRFTISRDNAKNSLFLQMNSLRAEDTAVYYCARDQGYHYYDSAEHAFDIWGQGTVVTVSSGGGGSGGGGSGGGGSQSALTQPASVSGSPGHSITISCTGTRSDVGGFDYVSWYQHNPGKAPKLIIYDVTKRPSGVSNRFSGAKSGITASLTISGLQAEDEADYYCTSYRPGPTFVFGTGTKLTVL

SEQ ID NO: 258 - protein, 252 aa, Artificial Sequence
  source: /note="Description of Artificial Sequence: Synthetic scFv sequence"
QVQLVESGGGLVQPGRSLRLSCAASGFTFDDYAMHWVRQAPGKGLEWVSGISWNSGRIGYADSVKGRFTISRDNAKNSLFLQMNSLRAEDTAVYYCARDQGYHYYDSAEHAFDIWGQGTVVTVSSGGGGSGGGGSGGGGSQSALTQPASVSGSPGQSITISCTGTSSDLGGYNYVSWYQHRPGKAPKLIIYDVTVRPSGVSDRFSGSKSGNTASLTISGLQAEDEADYYCGSYTSSSTLLWVFGGGTKLDIK

SEQ ID NO: 259 - protein, 252 aa, Artificial Sequence
  source: /note="Description of Artificial Sequence: Synthetic scFv sequence"
QVQLVESGGGLVQPGRSLRLSCAASGFTFDDYAMHWVRQAPGKGLEWVSGISWNSGRIGYADSVKGRFTISRDNAKNSLFLQMNSLRAEDTAVYYCARDQGYHYYDSAEHAFDIWGQGTVVTVSSGGGGSGGGGSGGGGSQSALTQPASVSGSPGQSITISCTGTSSDLGGYNYVSWYQHRPGKAPKLIIYDVTVRPSGVSDRFSGSKSGNTASLTISGLQAEDEADYYCGSYTSSSTLLWVFGGGTKLTVL

SEQ ID NO: 260 - protein, 252 aa, Artificial Sequence
  source: /note="Description of Artificial Sequence: Synthetic scFv sequence"
  MOD_RES (76)..(76): Any amino acid
  MOD_RES (201)..(201): Any amino acid
QVQLVESGGGLVQPGRSLRLSCAASGFTFDDYAMHWVRQAPGKGLEWVSGISWNSGRIGYADSVKGRFTISRDNAXNSLFLQMNSLRAEDTAVYYCARDQGYHYYDSAEHAFDIWGQGTVVTVSSGGGGSGGGGSGGGGSQSALTQPASVSGSPGQSITISCTETSSDLGGYNYVSWYQHRPGKAPKLIIYDVTVRPSGVXDRFSGSKSGNTASLTISGLQAEDEADYYCGSYTSSSTLLWVFGGGTKLTVL

SEQ ID NO: 261 - protein, 249 aa, Artificial Sequence
  source: /note="Description of Artificial Sequence: Synthetic scFv sequence"
  MOD_RES (64)..(65): Any amino acid
  MOD_RES (68)..(69): Any amino acid
  MOD_RES (93)..(93): Any amino acid
  MOD_RES (98)..(98): Any amino acid
  MOD_RES (102)..(102): Any amino acid
  MOD_RES (104)..(104): Any amino acid
  MOD_RES (113)..(113): Any amino acid
  MOD_RES (145)..(146): Any amino acid
  MOD_RES (148)..(149): Any amino acid
  MOD_RES (233)..(233): Any amino acid
  MOD_RES (244)..(244): Any amino acid
QVQLVESGGGLVQPGRSLRLSCAASGFTFDDYAMHWVRQAPGKGLEWVSGISWNSGRIGYADSXXGRXXISRDNAKNSLFLQMNSLRAEDTAXYYCAXDQGXHXYDSAEHAFXIWGQGTVVTVSSGGGGSGGGGSGGGGSQSVLXXPXXASGSPGQSVTVSCTGTGRDIGAYDYVSWYQQHPGKAPKLLIYGVNKRPSGVPDRFSGSKSDNTASLTVSGLQVEDEADYYCSSXAGRKYVFGTGXKVTVL

SEQ ID NO: 262 - protein, 249 aa, Artificial Sequence
  source: /note="Description of Artificial Sequence: Synthetic scFv sequence"
QVQLVQSGGGVVQPGRSLRLSCAASGFTFDDYAMHWVRQAPGKGLEWVSGISWNSGSIGYADSVKGRFTISRDNAKNSLYLQMNSLRAEDTAVYYCARDQGYHYYDSAEHAFDIWGQGTVVTVSSGGGGSGGGGSGGGGSEIVLTQSPATLSLSPGETATLSCRASQSINHYLAWYQQKPGQAPRLLIYDASNRATGIPARFSGSGSGTDFTLTISSLEPEDFATYYCQQSYSHPRMYTFGQGTKLEIK

SEQ ID NO: 263 - protein, 263 aa, Artificial Sequence
  source: /note="Description of Artificial Sequence: Synthetic scFv sequence"
WSHPQFEKGGGGSGGGGSDIQMTQTTSSLSASLGDRVTISCRASQDISKYLNWYQQKPDGTVKLLIYHTSRLHSGVPSRFSGSGSGTDYSLTISNLEQEDIATYFCQQGNTLPYTFGGGTKLEITGSTSGSGKPGSGEGSTKGEVKLQESGPGLVAPSQSLSVTCTVSGVSLPDYGVSWIRQPPRKGLEWLGVIWGSETTYYNSALKSRLTIIKDNSKSQVFLKMNSLQTDDTAIYYCAKHYYYGGSYAMDYWGQGTSVTVSS

SEQ ID NO: 264 - DNA, 882 bp, Artificial Sequence
  source: /note="Description of Artificial Sequence: Synthetic scFv sequence"
atgaaatacctattgcctacggcagccgctggattgttattactcgcagcaagcggcgcgcatgcctcctatgagctgacacagccaccctcggtgtcagtggccccaggaaagacggccacaattccctgtgggggaaacaacattgagagtaaaagtgtccactggtaccagcagcggccaggccaggcccctgtcttggtcatctatgatgataccgaccggccctcagggatccctgagcgattctctggctccaactctgggaacacggccaccctgaccatcagcggggtcgaagccggggatgaggccgactatttctgtcaggtgtgggatagtcatagtgatcatgaggtgttcggcggagggaccaagctcaccgtcctatccggagggtcgaccataacttcgtataatgtatactatacgaagttatcctcgagcggttccgaggtgcagctggtggagaccgggggaggcttggtacagcctggagggtccctgagactctcctgtgcagcctctggattcaccttcagtagttatgaaatgaactgggtccgccaggctccagggaaggggctggagtgggtttcatacattagtagtagtggcagtaccatatactacgcagactctgtgaagggccgattcaccatctccagagacaacgccaagaactcactgtatctgcaaatgaacagcctgagagctgaggacacggctgtttattactgtgcgagagagcatgagtgggaggcgggcgcttttgatatctggggccaagggacaatggtcaccgtctcttcagctagcggcaaaccaatcccaaacccactgctgggcctggatagtactcaccatcaccatcaccattga

SEQ ID NO: 265 - protein, 293 aa, Artificial Sequence
  source: /note="Description of Artificial Sequence: Synthetic scFv sequence"
MKYLLPTAAAGLLLLAASGAHASYELTQPPSVSVAPGKTATIPCGGNNIESKSVHWYQQRPGQAPVLVIYDDTDRPSGIPERFSGSNSGNTATLTISGVEAGDEADYFCQVWDSHSDHEVFGGGTKLTVLSGGSTITSYNVYYTKLSSSGSEVQLVETGGGLVQPGGSLRLSCAASGFTFSSYEMNWVRQAPGKGLEWVSYISSSGSTIYYADSVKGRFTISRDNAKNSLYLQMNSLRAEDTAVYYCAREHEWEAGAFDIWGQGTMVTVSSASGKPIPNPLLGLDSTHHHHHH

SEQ ID NO: 266 - protein, 275 aa, Artificial Sequence
  source: /note="Description of Artificial Sequence: Synthetic scFv sequence"
  MOD_RES (236)..(236): Any amino acid
  MOD_RES (245)..(245): Any amino acid
GAHASYELTQPPSVSVAPGKTATIPCGGNNIESKSVHWYQQRPGQAPVLVIYDDTDRPSGIPERFSGSNSGNTATLTISGVEAGDEADYFCQVWDSHSDHEVFGGGTKLTVLSGGSTITSYNVYYTKLSSSGSEVQLVETGGGLVQPGGSLRLSCAASGFTFSSYEMNWVRQAPGKGLEWVSYISSSGSTIYYADSVKGRFTISRDNAKNSLYLQMNSLRAEDTAVYYCAREHEWXAGAFDIWGXGTMVTVSSASGKPIPNPLLGLDSTHHHHHH

SEQ ID NO: 267 - protein, 273 aa, Artificial Sequence
  source: /note="Description of Artificial Sequence: Synthetic scFv sequence"
GAHAQPVLTQPPSVSVAPGQTAKITCGGNNIGSKSVHWYQQKPGQAPVLVVYDDSDRPSGIPERFSGSNSGNAATLTISRVEAGDEADYYCQVWDSSSGLVFGTGTKVTVLSGGSTITSYNVYDTKLSSSGTEVQLLESGAEVKKPGESLKISCKGSGYSFTSYWIGWVRQMPGKGLEWMGIIYPGDSDTRYSPSSQGQVTISADKSISTAYLRWSGLKASDTAMYYCARVSSDSGAFDIWGQGTMVTVSSASGKPIPNPLLGLDSTHHHHHH

SEQ ID NO: 268 - DNA, 822 bp, Artificial Sequence
  source: /note="Description of Artificial Sequence: Synthetic scFv sequence"
ggcgcgcatgcccagccagtgctgactcagcccccctcggtgtcagtggccccgggacagacggccaagatcacctgtgggggaaacaacattggaagtaaaagtgtgcactggtaccagcagaagccaggccaggcccctgtgctggtcgtctatgatgatagcgaccggccctcagggatccctgagcgattctctggctccaactctgggaacgcggccaccctgaccatcagcagggtcgaagccggggatgaggccgactattactgtcaggtgtgggatagtagtagtggccttgtcttcggaactgggaccaaggtcaccgtcctatccggagggtcgaccataacttcgtataatgtatacgatacgaagttatcctcgagcggtaccgaggtgcagttgttggagtctggagcagaggtgaaaaagccgggggagtctctgaagatctcctgtaagggttctggatacagctttaccagctactggatcggctgggtgcgccagatgcccgggaaaggcctggagtggatggggatcatctatcctggtgactctgataccagatacagcccgtcctcccaaggccaggtcaccatctcagccgacaagtccatcagcaccgcctacctgcggtggagcggcctgaaggcctcggacaccgccatgtattactgtgcgagagtatcgagtgactccggtgcttttgatatctggggccaagggacaatggtcaccgtctcttcagctagcggcaaaccaatcccaaacccactgctgggcctggatagtactcaccatcaccatcaccattag

SEQ ID NO: 269 - DNA, 813 bp, Artificial Sequence
  source: /note="Description of Artificial Sequence: Synthetic scFv sequence"
atggccctccctgtcaccgccctgctgcttccgctggctcttctgctccacgccgctcggcccgaaattgtgatgacccagtcacccgccactcttagcctttcacccggtgagcgcgcaaccctgtcttgcagagcctcccaagacatctcaaaataccttaattggtatcaacagaagcccggacaggctcctcgccttctgatctaccacaccagccggctccattctggaatccctgccaggttcagcggtagcggatctgggaccgactacaccctcactatcagctcactgcagccagaggacttcgctgtctatttctgtcagcaagggaacaccctgccctacacctttggacagggcaccaagctcgagattaaaggtggaggtggcagcggaggaggtgggtccggcggtggaggaagccaggtccaactccaagaaagcggaccgggtcttgtgaagccatcagaaactctttcactgacttgtactgtgagcggagtgtctctccccgattacggggtgtcttggatcagacagccaccggggaagggtctggaatggattggagtgatttggggctctgagactacttactactcttcatccctcaagtcacgcgtcaccatctcaaaggacaactctaagaatcaggtgtcactgaaactgtcatctgtgaccgcagccgacaccgccgtgtactattgcgctaagcattactattatggcgggagctacgcaatggattactggggacagggtactctggtcaccgtgtccagccaccaccatcatcaccatcaccat

SEQ ID NO: 270 - DNA, 813 bp, Artificial Sequence
  source: /note="Description of Artificial Sequence: Synthetic scFv sequence"
atggccctccctgtcaccgccctgctgcttccgctggctcttctgctccacgccgctcggcccgaaattgtgatgacccagtcacccgccactcttagcctttcacccggtgagcgcgcaaccctgtcttgcagagcctcccaagacatctcaaaataccttaattggtatcaacagaagcccggacaggctcctcgccttctgatctaccacaccagccggctccattctggaatccctgccaggttcagcggtagcggatctgggaccgactacaccctcactatcagctcactgcagccagaggacttcgctgtctatttctgtcagcaagggaacaccctgccctacacctttggacagggcaccaagctcgagattaaaggtggaggtggcagcggaggaggtgggtccggcggtggaggaagccaggtccaactccaagaaagcggaccgggtcttgtgaagccatcagaaactctttcactgacttgtactgtgagcggagtgtctctccccgattacggggtgtcttggatcagacagccaccggggaagggtctggaatggattggagtgatttggggctctgagactacttactaccaatcatccctcaagtcacgcgtcaccatctcaaaggacaactctaagaatcaggtgtcactgaaactgtcatctgtgaccgcagccgacaccgccgtgtactattgcgctaagcattactattatggcgggagctacgcaatggattactggggacagggtactctggtcaccgtgtccagccaccaccatcatcaccatcaccat

SEQ ID NO: 271 - protein, 271 aa, Artificial Sequence
  source: /note="Description of Artificial Sequence: Synthetic scFv sequence"
MALPVTALLLPLALLLHAARPEIVMTQSPATLSLSPGERATLSCRASQDISKYLNWYQQKPGQAPRLLIYHTSRLHSGIPARFSGSGSGTDYTLTISSLQPEDFAVYFCQQGNTLPYTFGQGTKLEIKGGGGSGGGGSGGGGSQVQLQESGPGLVKPSETLSLTCTVSGVSLPDYGVSWIRQPPGKGLEWIGVIWGSETTYYQSSLKSRVTISKDNSKNQVSLKLSSVTAADTAVYYCAKHYYYGGSYAMDYWGQGTLVTVSSHHHHHHHH

SEQ ID NO: 272 - DNA, 813 bp, Artificial Sequence
  source: /note="Description of Artificial Sequence: Synthetic scFv sequence"
atggctctgcccgtgaccgcactcctcctgccactggctctgctgcttcacgccgctcgcccacaagtccagcttcaagaatcagggcctggtctggtgaagccatctgagactctgtccctcacttgcaccgtgagcggagtgtccctcccagactacggagtgagctggattagacagcctcccggaaagggactggagtggatcggagtgatttggggtagcgaaaccacttactattcatcttccctgaagtcacgggtcaccatttcaaaggataactcaaagaatcaagtgagcctcaagctctcatcagtcaccgccgctgacaccgccgtgtattactgtgccaagcattactactatggagggtcctacgccatggactactggggccagggaactctggtcactgtgtcatctggtggaggaggtagcggaggaggcgggagcggtggaggtggctccgaaatcgtgatgacccagagccctgcaaccctgtccctttctcccggggaacgggctaccctttcttgtcgggcatcacaagatatctcaaaatacctcaattggtatcaacagaagccgggacaggcccctaggcttcttatctaccacacctctcgcctgcatagcgggattcccgcacgctttagcgggtctggaagcgggaccgactacactctgaccatctcatctctccagcccgaggacttcgccgtctacttctgccagcagggtaacaccctgccgtacaccttcggccagggcaccaagcttgagatcaaacatcaccaccatcatcaccatcac

SEQ ID NO: 273 - protein, 271 aa, Artificial Sequence
  source: /note="Description of Artificial Sequence: Synthetic scFv sequence"
MALPVTALLLPLALLLHAARPQVQLQESGPGLVKPSETLSLTCTVSGVSLPDYGVSWIRQPPGKGLEWIGVIWGSETTYYSSSLKSRVTISKDNSKNQVSLKLSSVTAADTAVYYCAKHYYYGGSYAMDYWGQGTLVTVSSGGGGSGGGGSGGGGSEIVMTQSPATLSLSPGERATLSCRASQDISKYLNWYQQKPGQAPRLLIYHTSRLHSGIPARFSGSGSGTDYTLTISSLQPEDFAVYFCQQGNTLPYTFGQGTKLEIKHHHHHHHH

SEQ ID NO: 274 - DNA, 813 bp, Artificial Sequence
  source: /note="Description of Artificial Sequence: Synthetic scFv sequence"
atggctctgcccgtgaccgcactcctcctgccactggctctgctgcttcacgccgctcgcccacaagtccagcttcaagaatcagggcctggtctggtgaagccatctgagactctgtccctcacttgcaccgtgagcggagtgtccctcccagactacggagtgagctggattagacagcctcccggaaagggactggagtggatcggagtgatttggggtagcgaaaccacttactatcaatcttccctgaagtcacgggtcaccatttcaaaggataactcaaagaatcaagtgagcctcaagctctcatcagtcaccgccgctgacaccgccgtgtattactgtgccaagcattactactatggagggtcctacgccatggactactggggccagggaactctggtcactgtgtcatctggtggaggaggtagcggaggaggcgggagcggtggaggtggctccgaaatcgtgatgacccagagccctgcaaccctgtccctttctcccggggaacgggctaccctttcttgtcgggcatcacaagatatctcaaaatacctcaattggtatcaacagaagccgggacaggcccctaggcttcttatctaccacacctctcgcctgcatagcgggattcccgcacgctttagcgggtctggaagcgggaccgactacactctgaccatctcatctctccagcccgaggacttcgccgtctacttctgccagcagggtaacaccctgccgtacaccttcggccagggcaccaagcttgagatcaaacatcaccaccatcatcaccatcac

SEQ ID NO: 275 - protein, 271 aa, Artificial Sequence
  source: /note="Description of Artificial Sequence: Synthetic scFv sequence"
MALPVTALLLPLALLLHAARPQVQLQESGPGLVKPSETLSLTCTVSGVSLPDYGVSWIRQPPGKGLEWIGVIWGSETTYYQSSLKSRVTISKDNSKNQVSLKLSSVTAADTAVYYCAKHYYYGGSYAMDYWGQGTLVTVSSGGGGSGGGGSGGGGSEIVMTQSPATLSLSPGERATLSCRASQDISKYLNWYQQKPGQAPRLLIYHTSRLHSGIPARFSGSGSGTDYTLTISSLQPEDFAVYFCQQGNTLPYTFGQGTKLEIKHHHHHHHH

SEQ ID NO: 276 - DNA, 828 bp, Artificial Sequence
  source: /note="Description of Artificial Sequence: Synthetic scFv sequence"
atggccctcccagtgaccgctctgctgctgcctctcgcacttcttctccatgccgctcggcctgagatcgtcatgacccaaagccccgctaccctgtccctgtcacccggcgagagggcaaccctttcatgcagggccagccaggacatttctaagtacctcaactggtatcagcagaagccagggcaggctcctcgcctgctgatctaccacaccagccgcctccacagcggtatccccgccagattttccgggagcgggtctggaaccgactacaccctcaccatctcttctctgcagcccgaggatttcgccgtctatttctgccagcaggggaatactctgccgtacaccttcggtcaaggtaccaagctggaaatcaagggaggcggaggatcaggcggtggcggaagcggaggaggtggctccggaggaggaggttcccaagtgcagcttcaagaatcaggacccggacttgtgaagccatcagaaaccctctccctgacttgtaccgtgtccggtgtgagcctccccgactacggagtctcttggattcgccagcctccggggaagggtcttgaatggattggggtgatttggggatcagagactacttactactcttcatcacttaagtcacgggtcaccatcagcaaagataatagcaagaaccaagtgtcacttaagctgtcatctgtgaccgccgctgacaccgccgtgtactattgtgccaaacattactattacggagggtcttatgctatggactactggggacaggggaccctggtgactgtctctagccatcaccatcaccaccatcatcac

SEQ ID NO: 277 - protein, 276 aa, Artificial Sequence
  source: /note="Description of Artificial Sequence: Synthetic scFv sequence"
MALPVTALLLPLALLLHAARPEIVMTQSPATLSLSPGERATLSCRASQDISKYLNWYQQKPGQAPRLLIYHTSRLHSGIPARFSGSGSGTDYTLTISSLQPEDFAVYFCQQGNTLPYTFGQGTKLEIKGGGGSGGGGSGGGGSGGGGSQVQLQESGPGLVKPSETLSLTCTVSGVSLPDYGVSWIRQPPGKGLEWIGVIWGSETTYYSSSLKSRVTISKDNSKNQVSLKLSSVTAADTAVYYCAKHYYYGGSYAMDYWGQGTLVTVSSHHHHHHHH

SEQ ID NO: 278 - protein, 248 aa, Artificial Sequence
  source: /note="Description of Artificial Sequence: Synthetic scFv sequence"
QVQLLESGAELVRPGSSVKISCKASGYAFSSYWMNWVKQRPGQGLEWIGQIYPGDGDTNYNGKFKGQATLTADKSSSTAYMQLSGLTSEDSAVYSCARKTISSVVDFYFDYWGQGTTVTGSTSGSGKPGSGEGSTKGELVLTQSPKFMSTSVGDRVSVTCKASQNVGTNVAWYQQKPGQSPKPLIYSATYRNSGVPDRFTGSGSGTDFTLTITNVQSKDLADYFYFCQYNRYPYTSGGGTKLEIKRRS

SEQ ID NO: 279 - protein, 514 aa, Artificial Sequence
  source: /note="Description of Artificial Sequence: Synthetic scFv sequence"
EIVMTQSPATLSLSPGERATLSCRASQDISKYLNWYQQKPGQAPRLLIYHTSRLHSGIPARFSGSGSGTDYTLTISSLQPEDFAVYFCQQGNTLPYTFGQGTKLEIKGGGGSGGGGSGGGGSQVQLQESGPGLVKPSETLSLTCTVSGVSLPDYGVSWIRQPPGKGLEWIGVIWGSETTYYQSSLKSRVTISKDNSKNQVSLKLSSVTAADTAVYYCAKHYYYGGSYAMDYWGQGTLVTVSSGGGGSGGGGSGGGGSGGGGSEVQLQQSGPGLVKPSQTLSLTCAISGDSVSSNSAAWNWIRQSPSRGLEWLGRTYYRSKWYNDYAVSVKSRITINPDTSKNQFSLQLNSVTPEDTAVYYCARDLGWIAVAGTFDYWGQGTLVTVSSGGGGSGGGGSGGGGSQSALTQPASVSGSPGQSITISCTGTSSDVGGYNYVSWYQQHPGKAPKLMIYDVSKRPSGVSNRFSGSKSGNTASLTISGLQAEDEADYYCSSYTSSSLNHVFGTGTKVTVLT

SEQ ID NO: 280 - protein, 514 aa, Artificial Sequence
  source: /note="Description of Artificial Sequence: Synthetic scFv sequence"
EVQLQQSGPGLVKPSQTLSLTCAISGDSVSSNSAAWNWIRQSPSRGLEWLGRTYYRSKWYNDYAVSVKSRITINPDTSKNQFSLQLNSVTPEDTAVYYCARDLGWIAVAGTFDYWGQGTLVTVSSGGGGSGGGGSGGGGSQSALTQPASVSGSPGQSITISCTGTSSDVGGYNYVSWYQQHPGKAPKLMIYDVSKRPSGVSNRFSGSKSGNTASLTISGLQAEDEADYYCSSYTSSSLNHVFGTGTKVTVLTGGGGSGGGGSGGGGSGGGGSEIVMTQSPATLSLSPGERATLSCRASQDISKYLNWYQQKPGQAPRLLIYHTSRLHSGIPARFSGSGSGTDYTLTISSLQPEDFAVYFCQQGNTLPYTFGQGTKLEIKGGGGSGGGGSGGGGSQVQLQESGPGLVKPSETLSLTCTVSGVSLPDYGVSWIRQPPGKGLEWIGVIWGSETTYYQSSLKSRVTISKDNSKNQVSLKLSSVTAADTAVYYCAKHYYYGGSYAMDYWGQGTLVTVSS

SEQ ID NO: 281 - protein, 271 aa, Artificial Sequence
  source: /note="Description of Artificial Sequence: Synthetic scFv sequence"
MALPVTALLLPLALLLHAARPEIVMTQSPATLSLSPGERATLSCRASQDISKYLNWYQQKPGQAPRLLIYHTSRLHSGIPARFSGSGSGTDYTLTISSLQPEDFAVYFCQQGNTLPYTFGQGTKLEIKGGGGSGGGGSGGGGSQVQLQESGPGLVKPSETLSLTCTVSGVSLPDYGVSWIRQPPGKGLEWIGVIWGSETTYYSSSLKSRVTISKDNSKNQVSLKLSSVTAADTAVYYCAKHYYYGGSYAMDYWGQGTLVTVSSHHHHHHHH

SEQ ID NO: 282 - protein, 242 aa, Artificial Sequence
  source: /note="Description of Artificial Sequence: Synthetic scFv sequence"
EIVMTQSPATLSLSPGERATLSCRASQDISKYLNWYQQKPGQAPRLLIYHTSRLHSGIPARFSGSGSGTDYTLTISSLQPEDFAVYFCQQGNTLPYTFGQGTKLEIKGGGGSGGGGSGGGGSQVQLQESGPGLVKPSETLSLTCTVSGVSLPDYGVSWIRQPPGKGLEWIGVIWGSETTYYSSSLKSRVTISKDNSKNQVSLKLSSVTAADTAVYYCAKHYYYGGSYAMDYWGQGTLVTVSS

SEQ ID NO: 283 - protein, 247 aa, Artificial Sequence
  source: /note="Description of Artificial Sequence: Synthetic scFv sequence"
QVQLQESGPGLVKPSETLSLTCTVSGVSLPDYGVSWIRQPPGKGLEWIGVIWGSETTYYNSSLKSRVTISKDNSKNQVSLKLSSVTAADTAVYYCAKHYYYGGSYAMDYWGQGTLVTVSSGGGGSGGGGSGGGGSGGGGSEIVMTQSPATLSLSPGERATLSCRASQDISKYLNWYQQKPGQAPRLLIYHTSRLHSGIPARFSGSGSGTDYTLTISSLQPEDFAVYFCQQGNTLPYTFGQGTKLEIK

SEQ ID NO: 284 - protein, 242 aa, Artificial Sequence
  source: /note="Description of Artificial Sequence: Synthetic scFv sequence"
EIVMTQSPATLSLSPGERATLSCRASQDISKYLNWYQQKPGQAPRLLIYHTSRLHSGIPARFSGSGSGTDYTLTISSLQPEDFAVYFCQQGNTLPYTFGQGTKLEIKGGGGSGGGGSGGGGSQVQLQESGPGLVKPSETLSLTCTVSGVSLPDYGVSWIRQPPGKGLEWIGVIWGSETTYYNSSLKSRVTISKDNSKNQVSLKLSSVTAADTAVYYCAKHYYYGGSYAMDYWGQGTLVTVSS

SEQ ID NO: 285 - protein, 242 aa, Artificial Sequence
  source: /note="Description of Artificial Sequence: Synthetic scFv sequence"
QVQLQESGPGLVKPSETLSLTCTVSGVSLPDYGVSWIRQPPGKGLEWIGVIWGSETTYYNSSLKSRVTISKDNSKNQVSLKLSSVTAADTAVYYCAKHYYYGGSYAMDYWGQGTLVTVSSGGGGSGGGGSGGGGSEIVMTQSPATLSLSPGERATLSCRASQDISKYLNWYQQKPGQAPRLLIYHTSRLHSGIPARFSGSGSGTDYTLTISSLQPEDFAVYFCQQGNTLPYTFGQGTKLEIK

SEQ ID NO: 286 - protein, 242 aa, Artificial Sequence
  source: /note="Description of Artificial Sequence: Synthetic scFv sequence"
EIVMTQSPATLSLSPGERATLSCRASQDISKYLNWYQQKPGQAPRLLIYHTSRLHSGIPARFSGSGSGTDYTLTISSLQPEDFAVYFCQQGNTLPYTFGQGTKLEIKGGGGSGGGGSGGGGSQVQLQESGPGLVKPSETLSLTCTVSGVSLPDYGVSWIRQPPGKGLEWIGVIWGSETTYYQSSLKSRVTISKDNSKNQVSLKLSSVTAADTAVYYCAKHYYYGGSYAMDYWGQGTLVTVSS

SEQ ID NO: 287 - protein, 247 aa, Artificial Sequence
  source: /note="Description of Artificial Sequence: Synthetic scFv sequence"
QVQLQESGPGLVKPSETLSLTCTVSGVSLPDYGVSWIRQPPGKGLEWIGVIWGSETTYYSSSLKSRVTISKDNSKNQVSLKLSSVTAADTAVYYCAKHYYYGGSYAMDYWGQGTLVTVSSGGGGSGGGGSGGGGSGGGGSEIVMTQSPATLSLSPGERATLSCRASQDISKYLNWYQQKPGQAPRLLIYHTSRLHSGIPARFSGSGSGTDYTLTISSLQPEDFAVYFCQQGNTLPYTFGQGTKLEIK

SEQ ID NO: 288 - protein, 247 aa, Artificial Sequence
  source: /note="Description of Artificial Sequence: Synthetic scFv sequence"
EIVMTQSPATLSLSPGERATLSCRASQDISKYLNWYQQKPGQAPRLLIYHTSRLHSGIPARFSGSGSGTDYTLTISSLQPEDFAVYFCQQGNTLPYTFGQGTKLEIKGGGGSGGGGSGGGGSGGGGSQVQLQESGPGLVKPSETLSLTCTVSGVSLPDYGVSWIRQPPGKGLEWIGVIWGSETTYYNSSLKSRVTISKDNSKNQVSLKLSSVTAADTAVYYCAKHYYYGGSYAMDYWGQGTLVTVSS

SEQ ID NO: 289 - protein, 111 aa, Artificial Sequence
  source: /note="Description of Artificial Sequence: Synthetic scFv sequence"
ELVLTQSPKFMSTSVGDRVSVTCKASQNVGTNVAWYQQKPGQSPKPLIYSATYRNSGVPDRFTGSGSGTDFTLTITNVQSKDLADYFYFCQYNRYPYTSGGGTKLEIKRRS

SEQ ID NO: 290 - protein, 251 aa, Artificial Sequence
  source: /note="Description of Artificial Sequence: Synthetic scFv sequence"
EVQLVQSGAEVKKPGESLKISCKGSGFTFRDYYMAWVRQMPGKGLEWMGSISYEGNPYYGDSVKGQVTISRDNSISTLYLQWSSLKASDTAMYYCARHDHNNVDWFAYWGQGTLVTVSSGGGGSGGGGSGGGGSGGGGSDIQMTQSPSSLSASVGDRVTITCKSSQSLLYSENKKNYLAWYQQKPGKVPKLLIFWASTRESGVPSRFSGSGSGTDFTLTISSLQPEDVATYYCQQYYNFPTFGQGTKLEIK

SEQ ID NO: 291 - protein, 251 aa, Artificial Sequence
  source: /note="Description of Artificial Sequence: Synthetic scFv sequence"
EVQLVQSGAEVKKPGESLKISCKGSGFTFRDYYMAWVRQMPGKGLEWMGSISYEGNPYYGDSVKGQVTISRDNSISTLYLQWSSLKASDTAMYYCARHDHNNVDWFAYWGQGTLVTVSSGGGGSGGGGSGGGGSGGGGSEIVMTQSPATLSLSPGERATLSCKSSQSLLYSENKKNYLAWYQQKPGQAPRLLIFWASTRESGIPARFSGSGSGTDFTLTISSLQPEDLAVYYCQQYYNFPTFGQGTKLEIK

SEQ ID NO: 292 - protein, 251 aa, Artificial Sequence
  source: /note="Description of Artificial Sequence: Synthetic scFv sequence"
QVQLVESGGGVVQPGRSLRLSCAASGFTFRDYYMAWVRQAPGKGLEWVASISYEGNPYYGDSVKGRFTISRDNAKSTLYLQMSSLRAEDTAVYYCARHDHNNVDWFAYWGQGTLVTVSSGGGGSGGGGSGGGGSGGGGSDIVMTQTPLSLSVTPGQPVSMSCKSSQSLLYSENKKNYLAWYLQKPGQSPQLLIFWASTRESGVPDRFSGSGSGTDFTLKISRVEAEDVGVYYCQQYYNFPTFGQGTKLEIK

SEQ ID NO: 293 - protein, 251 aa, Artificial Sequence
  source: /note="Description of Artificial Sequence: Synthetic scFv sequence"
QVQLVQSGAEVKKPGASVKVSCKASGFTFRDYYMAWVRQAPGQGLEWMGSISYEGNPYYGDSVKGRVTMTRDNSTSTLYMELSSLRSEDTAVYYCARHDHNNVDWFAYWGQGTLVTVSSGGGGSGGGGSGGGGSGGGGSDIQMTQSPSSLSASVGDRVTITCKSSQSLLYSENKKNYLAWYQQKPGKVPKLLIFWASTRESGVPSRFSGSGSGTDFTLTISSLQPEDVATYYCQQYYNFPTFGQGTKLEIK

SEQ ID NO: 294 - protein, 251 aa, Artificial Sequence
  source: /note="Description of Artificial Sequence: Synthetic scFv sequence"
QVQLVQSGAEVKKPGASVKVSCKASGFTFRDYYMAWVRQAPGQGLEWMGSISYEGNPYYGDSVKGRVTMTRDNSTSTLYMELSSLRSEDTAVYYCARHDHNNVDWFAYWGQGTLVTVSSGGGGSGGGGSGGGGSGGGGSEIVMTQSPATLSLSPGERATLSCKSSQSLLYSENKKNYLAWYQQKPGQAPRLLIFWASTRESGIPARFSGSGSGTDFTLTISSLQPEDLAVYYCQQYYNFPTFGQGTKLEIK

SEQ ID NO: 295 - protein, 251 aa, Artificial Sequence
  source: /note="Description of Artificial Sequence: Synthetic scFv sequence"
QVQLVQSGAEVKKPGASVKVSCKASGFTFRDYYMAWVRQAPGQRLEWMGSISYEGNPYYGDSVKGRVTITRDNSASTLYMELSSLRSEDTAVYYCARHDHNNVDWFAYWGQGTLVTVSSGGGGSGGGGSGGGGSGGGGSDIQMTQSPSSLSASVGDRVTITCKSSQSLLYSENKKNYLAWYQQKPGKVPKLLIFWASTRESGVPSRFSGSGSGTDFTLTISSLQPEDVATYYCQQYYNFPTFGQGTKLEIK

SEQ ID NO: 296 - protein, 247 aa, Artificial Sequence
  source: /note="Description of Artificial Sequence: Synthetic scFv sequence"
EVQLQQSGPGLVKPSLTLSLTCAISGDSVSSNSATWTWIRQSPSRGLEWLGRTYYRSTWYNDYAVSVKSRITINPDTSKNQFSLQLNSVTPEDTAVYYCAREGSGSYYAYWGQGTLVTVSSGGGGSGGGGSGGGGSQSALTQPASVSGSPGQSITISCTGTSSDVGGYNYVSWYQQHPGKAPKLMIYDVSNRPSGVSNRFSGSKSGNTASLTISGLQAEDEADYYCSSYTSSSTLYVFGTGTKVTVL

SEQ ID NO: 297 - protein, 253 aa, Artificial Sequence
  source: /note="Description of Artificial Sequence: Synthetic scFv sequence"
EVQLQQSGPGLVKPSQTLPLTCAISGDSVLSNSDTWNWIRQSPSRGLEWLGRTYHRSTWYDDYASSVRGRVSINVDTSKNQYSLQLNAVTPEDTGVYYCARVRLQDGNSWSDAFDVWGQGTMVTVSSGGGGSGGGGSGGGGPQSALTQPASASGSPGQSVTISCTGTSSDVGGYNYVSWYQQHPGKAPKLMIYDVSNRPSGVSNRFSGSKSGNTASLTISGLQAEDEADYYCSSYTSSSTLYVFGTGTQLTVL

SEQ ID NO: 298 - protein, 253 aa, Artificial Sequence
  source: /note="Description of Artificial Sequence: Synthetic scFv sequence"
EVQLQQSGPGLVKPSQTLSLTCAISGDSMLSNSDTWNWIRQSPSRGLEWLGRTYHRSTWYDDYASSVRGRVSINVDTSKNQYSLQLNAVTPEDTGVYYCARVRLQDGNSWSDAFDVWGQGTMVTVSSGGGGSGGGGSGGGGSQSALTQPASASGSPGQSVTISCTGTSSDVGGYNYVSWYQQHPGKAPKLMIYDVSNRPSGVSNRFSGSKSGNTASLTISGLQAEDEADYYCSSYTSSSTLYVFGTGTQLTVL

SEQ ID NO: 299 - protein, 253 aa, Artificial Sequence
  source: /note="Description of Artificial Sequence: Synthetic scFv sequence"
EVQLQQSGPGLVKPSQTLSLTCAISGDSVLSNSDTWNWIRQSPSRGLEWLGRTYHRSTWYDDYASSVRGRVSINVDTSKNQYSLQLNAVTPEDTGAYYCARDRLQDGNSWSDAFDVWGQGTMVTVSSGGGGSGGGGSGGGGSQSALTQPASVSGSPGQSITISCTGTSSDVGGYNYVSWYQQHPGKAPKLMIYDVSNRPSGVSNRFSGSKSGNTASLTISGLQAEDEADYYCSSYTSSSTPYVFGTGTQLTVL

SEQ ID NO: 300 - protein, 253 aa, Artificial Sequence
  source: /note="Description of Artificial Sequence: Synthetic scFv sequence"
EVQLQQSGPGLVKPSQTLSLTCAISGDSVLSNSDTWNWIRQSPSRGLEWLGRTYHRSTWYDDYASSVRGRVSINVDTSKNQYSLQLNAVTPEDTGVYYCARDRLQDGNSWSDAFDVWGQGTMVTVSSGGGGSGGGGSGGGGSQSALTQPASASGSPGQSVTISCTGTSSDVGGYNYVSWYQQHPGKAPKLMIYDVSNRPSGVSNRFSGSKSGNTASLTISGLQAEDEADYYCSSYTSSSTLYVFGTGTQLTVL

SEQ ID NO: 301 - protein, 254 aa, Artificial Sequence
  source: /note="Description of Artificial Sequence: Synthetic scFv sequence"
EVQLQQSGPGLVKPSQTLSLTCAISGDSVLSNSDTWNWIRQSPSRGLEWLGRTYHRSTWYDDYASSVRGRVSINVDTSKNQYSLQLNAVTPEDTGVYYCARDRLQDGNSWSDAFDVWGQGTMVTVSSGGGGSGGGGSGGGGSQSALTQPASVSGSPGQSITISCTGSSSDIGGFNYVSWYQQHAGEAPKLMIYEVTNRPSGVSDRFSGSKSDNTASLTISGLQAEDEADYYCSSYASGSPLYVFGTGTKVTVLG

SEQ ID NO: 302 - protein, 254 aa, Artificial Sequence
  source: /note="Description of Artificial Sequence: Synthetic scFv sequence"
EVQLQQSGPGLVKPSQTLSLTCAISGDSVLSNSDTWNWIRQSPSRGLEWLGRTYHRSTWYDDYASSVRGRVSINVDTSKNQYSLQLNAVTPEDTGVYYCARDRLQDGNSWSDAFDVWGQGTMVTVSSGGGGSGGGGSGGGGSQSALTQPASVSGSPGQSITISCTGTSSDVGGYNYVSWYQQHPGKAPKLMIYDVSNRPSGVSNRFSGSKSGNTASLTISGLQAEDEADYYCSSYTSSSTLVYVFGTGTKVTVL

SEQ ID NO: 303 - protein, 254 aa, Artificial Sequence
  source: /note="Description of Artificial Sequence: Synthetic scFv sequence"
EVQLQQSGPGLVKPSQTLSLTCAISGDSVLSNSDTWNWIRQSPSRGLEWLGRTYHRSTWYDDYASSVRGRVSINVDTSKNQYSLQLNAVTPEDTGVYYCARDRLQDGNSWSDAFDVWGQGTMVTVSSGGGGSGGGGSGGGGSQSALTQPASVSGSPGQSITISCTGTSSDVGGYNYVSWYQQHPGKAPKLMIYDVSNRPSGVSNRFSGSKSGNTASLTISGLQAEDEADYYCSSYTSSSTLYVFGTGTKVTVLG

SEQ ID NO: 304 - protein, 254 aa, Artificial Sequence
  source: /note="Description of Artificial Sequence: Synthetic scFv sequence"
EVQLQQSGPGLVKPSQTLSLTCAISGDSVLSNSDTWNWIRQSPSRGLEWLGRTYHRSTWYDDYASSVRGRVSINVDTSKNQYSLQLNAVTPEDTGVYYCARDRLQDGNSWSDAFDVWGQGTMVTVSSGGGGSGGGGSGGGGSQSALTQPASVSGSPGQSITISCTGTSSDVGGYNYVSWYQQHPGKAPKLMIYEVSNRPSGVSNRFSGSKSGNTASLTISGLQAEDEADYYCSSYTSSSTLYIFGTGTKVTVLG

SEQ ID NO: 305 - protein, 254 aa, Artificial Sequence
  source: /note="Description of Artificial Sequence: Synthetic scFv sequence"
EVQLQQSGPGLVKPSQTLSLTCAISGDSVLSNSDTWNWIRQSPSRGLEWLGRTYHRSTWYDDYASSVRGRVSINVDTSKNQYSLQLNAVTPEDTGVYYCARDRLQDGNSWSDAFDVWGQGTMVTVSSGGGGSGGGGSGSGGSQSALTQPASVSGSPGQSITFSCTGTSSDIGGYNYVSWYQQHPGKAPKLMIYEVSNRPSGVSNRFSGTKSGNTASLTISGLQAEDEADYYCSSYTSSSTLYVFGTGTKLTVLG

SEQ ID NO: 306 - protein, 251 aa, Artificial Sequence
  source: /note="Description of Artificial Sequence: Synthetic scFv sequence"
EVQLQQSGPGLVKPSQTLSLTCAISGDSVSNNNAAWNWIRQSPSRGLEWLGRTYHRSTWYNDYVGSVKSRITINPDTSKNQFSLQLNSVTPEDTAVYYCARETDYGDYGAFDIWGQGTTVTVSSGGGGSGGGGSGGGGSQSALTQPASVSGSPGQSITISCTGSRNDIGAYESVSWYQQHPGNAPKLIIHGVNNRPSGVFDRFSVSQSGNTASLTISGLQAEDEADYYCSSHTTTSTLYVFGTGTKVTVLG

SEQ ID NO: 307 - protein, 251 aa, Artificial Sequence
  source: /note="Description of Artificial Sequence: Synthetic scFv sequence"
EVQLQQSGPGLVKPSQTLSLTCAISGDSVSSNSAAWNWIRQSPSRGLEWLGRTYYRSKWYNDYAVSVKSRITINPDTSKNQFSLQLNSVTPEDTAVYYCARDLGWIAVAGTFDYWGQGTLVTVSSGGGGSGGGGSGGGGSQSALTQPASVSGSPGQSITISCTGTSSDVGGYNYVSWYQQHPGKAPKLMIYDVSKRPSGVSNRFSGSKSGNTASLTISGLQAEDEADYYCSSYTSSSLNHVFGTGTKVTVL

SEQ ID NO: 308 - protein, 249 aa, Artificial Sequence
  source: /note="Description of Artificial Sequence: Synthetic scFv sequence"
EVQLQQSGPGLVKPSQTLSLTCAISGDSVSSNSAAWNWIRQSPSRGLEWLGRTYYRSKWYNDYAVSVKSRITINPDTSKNQFSLQLNSVTPEDTAVYYCAREESSSGWYEGNWFDPWGQGTLVTVSSGGGGSGGGGSGGGGSSSELTQDPAVSVALGQTVRITCQGDSLRSYYASWYQQKPGQAPVLVIYGKNHRPSGIPDRFSGSSSGDTDSLTITGAQAEDEADYYCHSRDSSGNHLFGGGTKLTVL

SEQ ID NO: 309 - protein, 254 aa, Artificial Sequence
  source: /note="Description of Artificial Sequence: Synthetic scFv sequence"
EVQLQQSGPGLVKPSQTLSLTCAISGDSVSSNSAAWNWIRQSPSRGLEWLGRTYYRSKWYSDYAVSVKSRITINPDTSKNQFSLQLNSVTPEDTAVYYCARDPYDFWSGYPDAFDIWGQGTMVTVSSGGGGSGGGGSGGGGSQSALTQPASVSGSPGQSITISCTGTSSDVGGYNYVSWYQQHPGKAPKVIISEVNNRPSGVSHRFSGSKSGNTASLTISGLQAEDEADYFCSSYTSGRTLYVFGTGSKVTVLG

SEQ ID NO: 310 - protein, 247 aa, Artificial Sequence
  source: /note="Description of Artificial Sequence: Synthetic scFv sequence"
EVQLQQSGPGLVNPSQTLSITCAISGDSVSSNSAAWNWIRQSPSRGLEWLGRTFYRSKWYNDYAVSVKGRITISPDTSKNQFSLQLNSVTPEDTAVYYCAGGDYYYGLDVWGQGTTVTVSSGGGGSGGGGSGGGGSQSALTQPASVSGSPGQSITISCTGSSSDVGGYNSVSWYQQHPGKAPKLMIYEVINRPSGVSHRFSGSKSGNTASLTISGLQAEDEADYYCSSYTSSSTYVFGTGTKVTVLG

SEQ ID NO: 311 - protein, 252 aa, Artificial Sequence
  source: /note="Description of Artificial Sequence: Synthetic scFv sequence"
EVQLVESGAEVKKPGASVKVSCKASGYTFTGYYMHWVRQAPGQGLEWMGWINPNSGGTNYAQKFQGRVTMTRDTSISTAYMELSRLRSDDTAVYYCAREPASSSWYGYYYYMDVWGKGTLVTVSSGGGGSGGGGSGGGGSGGGGSDIQMTQSPSSLSASVGDRVTITCRASQSINTYLNWYQQKPGKPPKLLIYAASNLQSGVPSRFSGSGSGTHFTLTISSLQPDDFATYYCQQSYSSLLTFGGGTKLEIK

SEQ ID NO: 312 - protein, 243 aa, Artificial Sequence
  source: /note="Description of Artificial Sequence: Synthetic scFv sequence"
EVQLVESGAEVKKPGASVKVSCKASGYTFTSYYMHWVRQAPGQGLEWMGIINPSGGSTSYAQKFQGRVTMTRDTSTSTAYMELSSLRSEDTAVYYCAREAGVVAVDYWGQGTLVTVSSGGGGSGGGGSGGGGSQSALTQPASVSGSPGQSITISCTGTSSDVGGYNYVSWYQQHPGKAPKLMIYDVSNRPSGVSNRFSGSKSGNTASLTISGLQAEDEADYYCSSYTSSSTWVFGGGTKLTVL

SEQ ID NO: 313 - protein, 247 aa, Artificial Sequence
  source: /note="Description of Artificial Sequence: Synthetic scFv sequence"
EVQLVESGAEVKKPGASVKVSCKASGYTFTSYYMHWVRQAPGQGLEWMGIINPSGGSTSYAQKFQGRVTMTRDTSTSTVYMELSSLRSEDTAVYYCARGPIGCSGGSCLDYWGQGTLVTVSSGGGGSGGGGSGGGGSQSALTQPAYVSGSPGQSITISCTGTNSDVGRYNYVSWYQQHPGKAPKLMIYEVSYRPSGVSNRFSGSKSGNTASLTISGLQAEDEADYYCSSYTTSSTLDFGTGTKVTVL

SEQ ID NO: 314 - protein, 252 aa, Artificial Sequence
  source: /note="Description of Artificial Sequence: Synthetic scFv sequence"
EVQLVESGAEVKKPGESLKISCKGSGYSFTGSWIGWGRQMPGKGLEWMGIIYPGDSDTRYSPSFQGQVTISADKSISTAYLQWSSLKASDTAMYYCARGFLRGGDCCGALDIWGQGTMVTVSSGGGGSGGGGSGGGGSDIVMTQSPLSLPVTPGEPASISCRSSQSLLHSNGYNYLDWYLQKPGQSPQLLIYLGSNRASGVPDRFSGSGSGTDFTLKISRVEAEDVGVYYCMQALQTPPWTFGQGTKLEIKR

SEQ ID NO: 315 - protein, 244 aa, Artificial Sequence
  source: /note="Description of Artificial Sequence: Synthetic scFv sequence"
EVQLVESGAEVKKPGSSVKVSCKASGGTFSSYAISWVRQAPGQGLEWMGGIIPIFGTANYAQKFQGRVTITADESTSTAYMELSSLRSEDTAVYYCARDHKVVRFGYWGQGTLVTVSSGGGGSGGGGSGGGGSHVILTQPPSASASLGASVKLTCTLSSGHSSYAIAWHQQQPEKGPRYLMKVNSDGSLSKGDGIPDRFSGSTSGAERYLTISSLQSEDEADYYCQTWGSGMAIFGGGTKLTVL

SEQ ID NO: 316 - protein, 245 aa, Artificial Sequence
  source: /note="Description of Artificial Sequence: Synthetic scFv sequence"
EVQLVESGGGLVKPGGSLKLSCAASGFAFSIYDMSWVRQTPEKRLEWVAYISSGGGTYYPDTVKGRFTISRDNAKNTLYLQMSSLKSEDTAMYYCARHSGYGSSYGVLFAYWGQGTLVTVSAGGGGSGGGGSGGGGSDIQMTQTTSSLSASLGDRVTISCRASQDISNYLNWYQQKPDGTVKLLIYYTSILHSGVPSRFSGSGSGTDYSLTISNLEQEDFATYFCQQGNTLPWTFGGGTKLEIKA

SEQ ID NO: 317 - protein, 245 aa, Artificial Sequence
  source: /note="Description of Artificial Sequence: Synthetic scFv sequence"
EVQLVESGGGLVKPGGSLKLSCAASGFAFSIYDMSWVRQTPEKRLEWVAYISSGGGTYYPDTVKGRFTISRDNAKNTLYLQMSSLKSEDTAMYYCARHSGYGTHWGVLFAYWGQGTLVTVSAGGGGSGGGGSGGGGSDIQMTQTTSSLSASLGDRVTISCRASQDISNYLNWYQQKPDGTVKLLIYYTSILHSGVPSRFSGSGSGTDYSLTISNLEQEDFATYFCQQGNTLPWTFGGGTKLEIKA

SEQ ID NO: 318 - protein, 247 aa, Artificial Sequence
  source: /note="Description of Artificial Sequence: Synthetic scFv sequence"
EVQLVESGGGLVKPGGSLRLSCAASGFTFSDYYMSWIRQAPGKGLEWVSYISSSGSTIYYADSVKGRFTISRDNAKNSLYLQMNSLRAEDTAVYYCARDDFWSGSVDYWGQGTLVTVSSGGGGSGGGGSGGGGSGGGGSSYVLTQPPSVSVAPGKTATITCGGTNIGSKNVHWYQQKPGQAPVLAIYYDSDRPSGIPERFSGSNSGNTATLTISRVEAGDEADYFCQVWDSSSDHWVFGGGTKLTVL

SEQ ID NO: 319 - protein, 241 aa, Artificial Sequence
  source: /note="Description of Artificial Sequence: Synthetic scFv sequence"
EVQLVESGGGLVKPGGSLRLSCVASGFTFSNAWMNWVRQAPGKGLEWVGRIKSKTDGGTADYAAPVKGRFTISRDDSKNTMYLQMNSLKTEDTGVYYCITGATDVWGQGTTVTVSSGGGGSGGGGSGGGGSSYVLTQPPSASGTPGQRVTISCSGSSSNIGSNYVYWYQQLPGTAPKLLIYRNNQRPSGVPDRFSGSKSGTSASLAISGLRSEDEADYYCAAWDDSLSGPVFGGGTKLTVL

SEQ ID NO: 320 - protein, 247 aa, Artificial Sequence
  source: /note="Description of Artificial Sequence: Synthetic scFv sequence"
EVQLVESGGGLVQPGGSLRLSCAASGFTFSSYAMHWVRQAPGKGLEYVSAISSNGGSTYYANSVKDRFTISRDNSKNTLYLQMGSLRAEDMAVYYCARVHSSGYYHPGPNDYWGQGTLVTVSSGGGGSGGGGSGGGGSSSELTQDPAVSVALGQTVRITCQGDSLRTYYATWYQQKPGQAPVLVFYDENNRPSGIPDRFSGSSSGNTASLTITGTQAEDEADYYCSSRDSSGNPSCVFGGGTKLTVL

SEQ ID NO: 321 - protein, 247 aa, Artificial Sequence
  source: /note="Description of Artificial Sequence: Synthetic scFv sequence"
EVQLVESGGGLVQPGGSLRLSCAASGFTFSSYAMSWVRQAPGKGLEWVSYISSSSSTIYYADSVKGRFTISRDNAKNSLYLQMNSLRAEDTAVYYCARDGPIRYFDHSKAFDIWGQGTMVTVSSGGGGSGGGGSGGGGSSSELTQDPAVSVALGQTVRITCQGDSLRSYYASWYQQKPGQAPVLVIYGKNNRPSGIPDRFSGSSSGNTASLTITGAQAEDEADYYRNSRDSSGNPYVFGTGTKVTVL

SEQ ID NO: 322 - protein, 245 aa, Artificial Sequence
  source: /note="Description of Artificial Sequence: Synthetic scFv sequence"
EVQLVESGGGLVQPGRSLRLSCAASGFTFDDYAMHWVRQAPGKGLEWVSGISWNSGSIGYADSVKGRFTISRDNAKNSLYLQMNSLRAEDTALYYCAKDKGGGYYDFWSGSDYWGQGTLVTVSSGGGGSGGGGSGGGGSSSELTQDPAVSVALGQTVRITCQGDSLRSYYASWYQQKPGQAPVLVIYGKNNRPSGIPDRFSGSSSGNTASLTITGAQAEDEADYYCNSRDSSGWVFGGGTKLTVL

SEQ ID NO: 323 - protein, 246 aa, Artificial Sequence
  source: /note="Description of Artificial Sequence: Synthetic scFv sequence"
EVQLVESGGGLVQPGRSLRLSCAASGFTFDDYAMHWVRQAPGKGLEWVSGISWNSGSIGYADSVKGRFTISRDNAKNSLYLQMNSLRAEDTALYYCAKGLSSWHFHDALDIWGQGTMVTVSSGGGGSGGGGSGGGGSSSELTQDPAVSVALGQTVRITCQGDSLRSYYASWYQQKPGQAPVLVIYGKNNRPSGIPDRFSGSSSGNTASLTITGAQAEDEADYYCNSRDSSGNHLWVFGGGTKLTVL

SEQ ID NO: 324 - protein, 254 aa, Artificial Sequence
  source: /note="Description of Artificial Sequence: Synthetic scFv sequence"
QVNLRESGPALVKPTQTLTLTCTFSGFSLNTFGMSVSWIRQPPGKALEWLALIDWDDDKYYSTSLRTRLTISKDTAKNQVVLRMTNMDPMDTATYYCARIYGGDRTNTQAPYFFDLWGQGTLVTVSSGGGGSGGGGSGGGGSDVVMTQSPLSLPVTPGEPASISCRSSQSLLHSNGYNYLDWYLQKPGQSPQLLIYLGSNRASGVPDRFSGSGSGTDFTLKISRVEAEDVGVYYCMQALQTPWTFGQGTKLEIK

SEQ ID NO: 325 - protein, 250 aa, Artificial Sequence
  source: /note="Description of Artificial Sequence: Synthetic scFv sequence"
QVQLQESGPGLVKPSETLSLTCSVSGGSINSYYWSWIRQAPGKGLEWIAFTSHSGNVKYNPSLTGRVTIAVDTSKNQFYLEVTSVTAADTAVYFCARGLDPLFAYDAFEIWGLGTMVTVSSGGGGSGGGGSGGGGSEIVLTQSPLSLPVTPGEPASISCRSSQSLLHSNGYNYLDWYLQKPGQSPQLLIYLGSNRASGVPDRFSGSGSGTDFTLKISRVEAEDVGVYYCMQVLQTPPLTFGGGTKVDIKR

SEQ ID NO: 326 - protein, 245 aa, Artificial Sequence
  source: /note="Description of Artificial Sequence: Synthetic scFv sequence"
QVQLQESGPGLVKPSETLSLTCTVSGGSISSSSYYWGWIRQPPGKGLEWIGSIYYSGSTYYNPSLKSRVTISVDTSKNQFSLKLSSVTAADTAVYYCARGRMDTAMAQIWGQGTMVTVSSGDGGSGGGGSGGGGSNFMLTQPHSVSESPGKTVTIPCTGSSGSFASSYVQWYQQRPGSAPATVIYEDNQRPSGVPDRFSGSVDSSSNSASLTISGLKTEDEAVYYCQSYDGATWVFGGGTKLTVL

SEQ ID NO: 327 - protein, 248 aa, Artificial Sequence
  source: /note="Description of Artificial Sequence: Synthetic scFv sequence"
QVQLQESGPGLVKPSGTLSLTCAVSGASITSRHWWNWVRHSPGKGLEWIGQIYHSGTTTYNPSLGSRVTISVDKSKNQISLELRSVTAADTATYYCVRDYLELATYYGMDVWGQGTTVTVSSGGGGSGGGGSGGGGSEIVLTQSPLSLPVTPGEPASISCRSSQSLLYSDGYNYLDWYLQKPGQSPQLLIYLGSNRASGVPDRFSGSGSGTDFTLQISGVETEDVGVYYCMQALQTQSFGQGTKLEIK

SEQ ID NO: 328 - protein, 254 aa, Artificial Sequence
  source: /note="Description of Artificial Sequence: Synthetic scFv sequence"
QVQLQESGPGLVKPSQTLSLTCAISGDSVLSNSDTWNWIRQSPSRGLEWLGRTYHRSTWYDDYASSVRGRVSINVDTSKNQYSLQLNAVTPEDTGVYYCARDRLQDGNSWSDAFDVWGQGTMVTVSSGGGGSGGGGSGSGGSQSALTQPASVSGSPGQSITISCTGTSSDVGGYNYVSWYQQHPGKAPKLMIYEVSNRPSGVSNRFSGSKSGNTASLTISGLQAEDEADYYCSSYTSSSTLYVFGTGTKVTVLG

SEQ ID NO: 329 - protein, 236 aa, Artificial Sequence
  source: /note="Description of Artificial Sequence: Synthetic scFv sequence"
QVQLQQSGPGLVKPSQTLSLTCAISGDSVSSNSAAWNWIRQSPSRGLEWLGRTYYRSKWYNDYAVSVKSRITINPDTSKNQFSLQLNSVTPEDTAVYYCAREVTGDLEDAFDIWGQGTMVTVSSGGGGSDIQMTQSPSSLSASVGDRVTITCRASQTIWSYLNWYQQRPGKAPNLLIYAASSLQSGVPSRFSGRGSGTDFTLTISSLQAEDFATYYCQQSYSIPQTFGQGTKLEIK

SEQ ID NO: 330 - protein, 247 aa, Artificial Sequence
  source: /note="Description of Artificial Sequence: Synthetic scFv sequence"
QVQLVQSGAEVKKPGASVKVSCKASGYTFTGYYMHWVRQAPGQGLEWMGWINPNSGGTNYAQKFQGRVTMTRDTSISTAYMELSRLRSDDTAVYYCARDYWGYYGSGTLDYWGQGTLVTVSSGGGGSGGGGSGGGGSQSALTQPGSVSGSPGQSITISCTGTSSDVGGYNYVSWYQQHPGKAPKLIIYDVSSRPSGVSNRFSGSQSGNTASLTISGLQAEDEADYSCSSYAGSNTLVFGTGTKVTVL

SEQ ID NO: 331 - protein, 252 aa, Artificial Sequence
  source: /note="Description of Artificial Sequence: Synthetic scFv sequence"
QVQLVQSGAEVKKPGASVKVSCKASGYTFTSYDINWVRQATGQGLEWMGWMNPNSGNTGYAQKFQGRVTMTRNTSISTAYMELSSLRSEDTAVYYCARGDSNYWSYYGMDVWGQGTLVTVSSGGGGSGGGGSGGGGSGGGGSQSVLTQPRSVSGSPGQSVTISCTGTSSDVGGYNYVSWYQQHPGEAPKLIIYDADKRPSGISNRFSSGKSGNTASLTISGLQVEDEADYYCCSYAGGSTWVFGGGTKVTVL

SEQ ID NO: 332 - protein, 254 aa, Artificial Sequence
  source: /note="Description of Artificial Sequence: Synthetic scFv sequence"
QVQLVQSGAEVKKPGASVKVSCKASGYTFTSYGISWVRQAPGQGLEWMGWISAYNGNTNYAQKLQGRVTMTTDTSTSTAYMELRSLRSDDTAVYYCARAGLALYSNYVPYYYYGMDVWGQGTTVTVSSGGGGSGGGGSGGGGSNFMLTQPHSVSESPGKTVTISCTRSSGSIASNYVQWYQQRPGSSPTTVIYEDNQRPSGVPDRFSGSIDSSSNSASLTISGLKTEDEADYYCQSYDSSNPWVFGGGTKLTVL

SEQ ID NO: 333 - protein, 247 aa, Artificial Sequence
  source: /note="Description of Artificial Sequence: Synthetic scFv sequence"
QVQLVQSGAEVKKPGASVKVSCKASGYTFTSYGISWVRQAPGQGLEWMGWISAYNGNTNYAQKLQGRVTMTTDTSTSTAYMELRSLRSDDTAVYYCASFSSSDSYDYWGQGTLVTVSSGGGGSGGGGSGGGGSGGGGSEIVLTQSPATLSVSPGERATLSCRASQSVTSNLAWYQQKPGQAPRLLIYAASTRATGIPARFSGSGSGTEFTLTISSMQSEDFAVYFCQQYHTWPPLTFGGGTKVEIKT

SEQ ID NO: 334 - protein, 244 aa, Artificial Sequence
  source: /note="Description of Artificial Sequence: Synthetic scFv sequence"
QVQLVQSGAEVKKPGASVKVSCKASGYTFTSYYMHWVRQAPGQGLEWMGIINPSGGSTSYAQKFQGRVTMTRDTSISTAYMELSRLRSDDTAVYYCAREMDDSSGPDYWGQGTLVTVSSGGGGSGGGGSGGGGSQSALTQPASVSGSPGQSITISCTGTSSDVGGYNYVSWYQQHPGKAPKLMIYEVSNRPSGVSNRFSGSKSGNTASLTISGLQAEDEADYYCSSYTSSSTLVFGTGTKLTVL

SEQ ID NO: 335 - protein, 246 aa, Artificial Sequence
  source: /note="Description of Artificial Sequence: Synthetic scFv sequence"
QVQLVQSGAEVKKPGASVKVSCKASGYTFTSYYMHWVRQAPGQGLEWMGIINPSGGSTSYAQKFQGRVTMTRDTSTSTVYMELSSLRAEDTAVYYCARGGYGDYLDAFDIWGQGTTVTVSSGGGGSGGGGSGSGGSQSALTQPASVSGSPGQSITISCTGTSSDVGGYNYVSWYQQHPGKAPKLMIYEVSNRPSGVSNRFSGSKSGNTASLTISGLQAEDEADYYCSSYTSSSTLVFGTGTQLTVL

SEQ ID NO: 336 - protein, 246 aa, Artificial Sequence
  source: /note="Description of Artificial Sequence: Synthetic scFv sequence"
QVQLVQSGAEVKKPGASVKVSCKASGYTFTSYYMHWVRQAPGQGLEWMGIINPSGGSTSYAQKFQGRVTMTRDTSTSTVYMELSSLRSEDTAVYYCARDDDFWSGSGAFDIWGQGTTVTVSSGGGGSGGGGSGGGGSSSELTQDPAVSVALGQTVRITCQGDSLRSYYASWYQQKPGQAPVLVIYGKNNRPSGIPDRFSGSSSGNTASLTITGAQAEDEADYYCNSRDSSGNHPVVFGGGTKLTVL

SEQ ID NO: 337 - protein, 246 aa, Artificial Sequence
  source: /note="Description of Artificial Sequence: Synthetic scFv sequence"
QVQLVQSGAEVKKPGASVKVSCKASGYTFTSYYMHWVRQAPGQGLEWMGIINPSGGSTSYAQKFQGRVTMTRDTSTSTVYMELSSLRSEDTAVYYCARDGFGELSGAFDIWGQGTMVTVSSGGGGSGGGGSGGGGSQSALTQPASVSGSPGQSITISCTGTSSDVGGYNYVSWYQQHPGKAPKLMIYDVSNRPSGVSNRFSGSKSGNTASLTISGLQAEDEADYYCSSYASSSTLVFGGGTKVTVL

SEQ ID NO: 338 - protein, 247 aa, Artificial Sequence
  source: /note="Description of Artificial Sequence: Synthetic scFv sequence"
QVQLVQSGAEVKKPGASVKVSCKASGYTFTSYYMHWVRQAPGQGLEWMGIINPSGGSTSYAQKFQGRVTMTRDTSTSTVYMELSSLRSEDTAVYYCARDLAAAGNYYYYGMDVWGQGTTVTVSSGGGGSGGGGSGGGGSSSELTQDPAVSVALGQTARITCQGDSLRSYFTSWYHQKPGQAPVLVIYGNNNRPSGIPDRFSGSSSGNTASLTITGAQAEDEGDYYCDSRDSSGDHLVFGGGTKLTVL

SEQ ID NO: 339 - protein, 242 aa, Artificial Sequence
  source: /note="Description of Artificial Sequence: Synthetic scFv sequence"
QVQLVQSGAEVKKPGASVKVSCKASGYTFTSYYMHWVRQAPGQGLEWMGIINPSGGSTSYAQKFQGRVTMTRDTSTSTVYMELSSLRSEDTAVYYCARDLDVSLDIWGQGTMVTVSSGGGGSGGGGSGGGGSQSALTQPASVSGSPGQSITISCSGTSSDVGGYNSVSWYQQYPGKAPKLMIYDVNNRPSGVSSRFSGSKSGNTASLTISGLQAEDEADYYCSSYTSSSTLFFGAGTKVTVL

SEQ ID NO: 340 - protein, 250 aa, Artificial Sequence
  source: /note="Description of Artificial Sequence: Synthetic scFv sequence"
QVQLVQSGAEVKKPGASVKVSCKASGYTFTSYYMHWVRQAPGQGLEWMGIINPSGGSTSYAQKFQGRVTMTRDTSTSTVYMELSSLRSEDTAVYYCAREDDSSGYTSPFDYWGQGTLVTVSSGGGGSGGGGSGGGGSGGGRSSYELTQPPSVSVAPGETASIACGGHNIRSKNVHWYQQKPGQAPVLVISYDGDRPSGIPERFSGSNLGSTATLTISRVEAGDEADYYCQVWDSDSDHYVFGTGTKVTVL

SEQ ID NO: 341 - protein, 241 aa, Artificial Sequence
  source: /note="Description of Artificial Sequence: Synthetic scFv sequence"
QVQLVQSGAEVKKPGASVKVSCKASGYTFTSYYMHWVRQAPGQGLEWMGIINPSGGSTSYAQKFQGRVTMTRDTSTSTVYMELSSLRSEDTAVYYCARGDYYMDVWGKGTTVTVSSGGGGSGGGGSGGGGSQSALTQPASASGSPGQSVTISCTGTSSDVGGYNYVSWYQQHPGKAPKLMIYEVSKRPSGVPDRFSGSKSGNTASLTISGLQAEDEADYYCSSYTSSGTLVFGGGTKLTVL

SEQ ID NO: 342 - protein, 245 aa, Artificial Sequence
  source: /note="Description of Artificial Sequence: Synthetic scFv sequence"
QVQLVQSGAEVKKPGASVKVSCKASGYTFTSYYMHWVRQAPGQGLEWMGIINPSGGSTSYAQKFQGRVTMTRDTSTSTVYMELSSLRSEDTAVYYCARGSGSLGDAFDIWGQGTMVTVSSGGGGSGGGGSGGGGSQSALTQPASVSGSPGQSITISCTGSSSDVGGYNYVSWYQQHPGKAPKLMIYEVSNRPSGVSNRFSGSKSGNTASLTISGLQAEDEADYYCSSYTSSSTLVFGTGTKVTVL

SEQ ID NO: 343 - protein, 246 aa, Artificial Sequence
  source: /note="Description of Artificial Sequence: Synthetic scFv sequence"
QVQLVQSGAEVKKPGASVKVSCKASGYTFTSYYMHWVRQAPGQGLEWMGIINPSGGSTSYAQKFQGRVTMTRDTSTSTVYMELSSLRSEDTAVYYCARGSYGDYGDAFDIWGQGTTVTVSSGGGGSGGGGSGSGGSQSALTQPASVSGSPGQSITISCTGTSSDVGGYKYVSWYQQHPGKAPKLMIYDVSNRPSGVSNRFSGSKSGNTASLTISGLQAEDEADYYCSSYTSSSTLVFGGGTKLTVL

SEQ ID NO: 344 - protein, 248 aa, Artificial Sequence
  source: /note="Description of Artificial Sequence: Synthetic scFv sequence"
QVQLVQSGAEVKKPGASVKVSCKASGYTFTSYYMHWVRQAPGQGLEWMGIINPSGGSTSYAQKFQGRVTMTRDTSTSTVYMELSSLRSEDTAVYYCARPEGVSYYDSSVLDYWGQGTLVTVSSGGGGSGGGGSGGGGSQSALTQPASVSGSPGQSITISCTGTSSDVGGYKHVSWYQHHPGKAPKLMIYDVSNRPSGVSNRFSGSKSGNTASLTVSGLQAEDEAHYYCVSYRNFNSLVFGTGTKVTVL

SEQ ID NO: 345 - protein, 251 aa, Artificial Sequence
  source: /note="Description of Artificial Sequence: Synthetic scFv sequence"
QVQLVQSGGGLIQPGGSLRLSCAASGFTVSSNYMSWVRQAPGKGLEWVSVIYSGGSTYYADSVKGRFTISRDNSKNTLYLQMNSLRAEDTAVYYCASQSTPYDSSGYYSGDAFDIWGQGTMVTVSSGGGGSGGGGSGGGGSSYVLTQPPSASGTPGQRVTISCSGSSSNIGSNYVYWYQQLPGTAPKLLIYRNNQRPSGVPDRFSGSKSGTSASLAISGLRSEDEADYYCAAWDDSLSGYVFGTGTKLTVL

SEQ ID NO: 346 - protein, 250 aa, Artificial Sequence
  source: /note="Description of Artificial Sequence: Synthetic scFv sequence"
QVQLVQSGGGVVQPGRSLRLSCAASGFTFSSYAMSWVRQAPGKGLEWVSAISGSGGSTYYADSVKGRFTISRDNSKNTLYLQMNSLRAEDTAVYYCAKEPLFGVVEEDVDYWGQGTLVTVSSGGGGSGGGGSGGGGSDVVMTQSPLSLPVTPGEPASISCRSSQSLLAGNGHNYLDWYLQKPGQSPQLLIYLGSNRASGVPDRFSGSGSGTDFTLKISRVEAEDVGVYYCMQALQNPLTFGGGTKLEIKR

SEQ ID NO: 347 - protein, 244 aa, Artificial Sequence
  source: /note="Description of Artificial Sequence: Synthetic scFv sequence"
EVQLVESGGGLVQPGGSLRLSCAASGFTFSSFGMHWVRQAPGKGLEWVAYISSDSSAIYYADTVKGRFTISRDNAKNSLYLQMNSLRDEDTAVYYCGRGRENIYYGSRLDYWGQGTTVTVSSGGGGSGGGGSGGGGSDIQLTQSPSFLSASVGDRVTITCKASQNVDTNVAWYQQKPGKAPKALIYSASYRYSGVPSRFSGSGSGTDFTLTISSLQPEDFATYYCQQYNNYPFTFGQGTKLEIK

SEQ ID NO: 348 - protein, 248 aa, Artificial Sequence
  source: /note="Description of Artificial Sequence: Synthetic scFv sequence"
QVQLQQSGAEVKKPGSSVKVSCKASGGTFSSYAISWVRQAPGQGLEWMGGIIPILGIANYAQKFQGRVTITADESTSTAYMELSSLRSEDTAVYYCARGGAGGSGSYYPLIWGQGTTVTVSSGGGGSGGGGSGGGGSEIVLTQSPATLSLSPGERATLSCGASQSVSSSYLAWYQQKPGQAPRLLIYDASSRATGIPARFSGSGSGTDFTLTISSLEPEDFAVYYCQQRSSWPPTWTFGQGTKLEIKR

SEQ ID NO: 349 - protein, 244 aa, Artificial Sequence
  source: /note="Description of Artificial Sequence: Synthetic scFv sequence"
QVQLQQSGAEVKKPGSSVKVSCKASGGTFSSYAISWVRQAPGQGLEWMGGIIPILGIANYAQKFQGRVTITADESTSTAYMELSSLRSEDTAVYYCATGGSGRYALDIWGQGTMVTVSSGGGGSGGGGSGGGGSEIVLTQSPATLSLSPGERATLSCRASQSVSSYLAWYQQKPGQAPRLLIYDASNRATGIPARFSGSGSGTDFTLTISSLEPEDFAVYYCQQRSNWPPSYTFGQGTKLEIKR

SEQ ID NO: 350 - protein, 242 aa, Artificial Sequence
  source: /note="Description of Artificial Sequence: Synthetic scFv sequence"
QVQLVQSGAEVKKPGSSVKVSCKASGGTFSSYAISWVRQAPGQGLEWMGGIIPILGTANYAQKFQGRVTITADESTSTAYMELSSLRSEDTAVYYCARWGGGAFDIWGQGTMVTVSSGGGGSGGGGSGGGGSEIVLTQSPGTLSLSPGERATLSCRASQSVGGYLAWYQQKPGQAPRLLIYDASNRATGIPARFSGSGSGTDFTLTISSLEPEDFAVYYCQQRNNWPPMYTFGQGTKLEIKR

SEQ ID NO: 351 - protein, 406 aa, Artificial Sequence
  source: /note="Description of Artificial Sequence: Synthetic scFv sequence"
QEDERIVLVDNKCKCARISRIIRSSEDPNEDIVERIRIIVPLNNREISDPSPLRTRFVYHLSDLCKKCDPTEVELDNQIVTATQSNICDEDSATETCYTYDRNKCYTAVVPLVYGGETKMVETALTPDACYPDGGGGSGGGGSGGGGSQVQLQQSGAELARPGASVKMSCKASGYTFTRYTMHWVKQRPGQGLEWIGYINPSRGYTNYNQKFKDKATLTTDKSSSTAYMQLSSLTSEDSAVYYCARYYDDHYSLDYWGQGTTLTVSSGGGGSGGGGSGGGGSQIVLTQSPAIMSASPGEKVTMTCSASSSVSYMNWYQQKSGTSPKRWIYDSKLASGVPAHFRGSGSGSYSLISGMEAEDAATYYCQQWSSNPFTFGSGTKLEIKEQKLISEEDLNSAVDHHHHHH

SEQ ID NO: 352 - protein, 558 aa, Artificial Sequence
  source: /note="Description of Artificial Sequence: Synthetic scFv sequence"
QVQLQQWGAGLLKPSETLSLTCAVYGGSFSGYYWSWIRQPPGKGLEWIGEINHSGSNYNPSLKSRVISVDSKNQFSLKLSSVTAADTAVYYCARGRMAWGASVNFDYWGQGTLVTVSSGSASAPTLFPLVSCENSPSDSSVAVGCLAQDFLPDSITFSWKYKNNSDISSTRGFPSVLRGGKYAASQVLLPSKDVMQGTDEHVVCKVQHPNGNKEKNVPLPVIAELPPKVSVFVPPRDGFFGNPRKSKLICQATGFSPRQIQVSWLREGKQVGSGVTTDQVQAEAKESGPTTYKVTSTLTIKESDWLSQSMFTCRVDHRGLTFQQNASSMCVPDQDTAIRVFAIPPSFASIFLTKSKLTCLVTDLTYDSVISWTRQNGEAVKTHTISESHPNAFSAVGEASICEDDWNSGERFTCTVTHDLPSPLKQISRPKGVALHRPDVYLLPPAREQLNLRESAICLVTGFSPADVFVQWMQRGQPLSPEKYVSAPMPEPQAPGRYFAHSILTVSEEEWNTGEYTCVVAHEALPNRVTERTVDKSTGKPTLYNVSLVMSDTAGTCY

SEQ ID NO: 353 - protein, 246 aa, Artificial Sequence
  source: /note="Description of Artificial Sequence: Synthetic scFv sequence"
LLHESGAEVAKPGASVKMSCKASGYTFTTYWMHWIKQRPGQGLEWIGYINPSTGYTDYNQNFKDKATLTADKSSRTAYMQLSSLTSEDSTVYYCTRRGPSYGNHGAWFPYWGQGTLVTVSAVSSGGGGSGGGGSGGGGSTNIVMTQSPRSMSMSVGERVTLSCKASENVDTYVSWYQQKPEQSPKLLIYGASNRYTGVPDRFTGSGSATDFTLTISSVQAEDLADYHCGQSYRYPPTFGGGTKLEI

SEQ ID NO: 354 - protein, 252 aa, Artificial Sequence
  source: /note="Description of Artificial Sequence: Synthetic scFv sequence"
RMAQVQLQQSGAELARPGASVKMSCKASGYTFTTYTIHWVRRRPGHDLEWIGYINPSSGCSDYNQNFKGKTTLTADKSSNTAYMQLNSLTSEDSAVYYCARRADYGNYEYTWFAYWGQGTTVTVSSSGGGSGGGGSGGGGSVIELTQSPKFMSTSVGDRVNVTYKASQNVGTNVAWFQQKPGQSPKVLIYSASYRYSGVPDRFTGSGSGTDFTLTISNVQSEDLAEYFCQQYHTYPLTFGGGTKLEIKRSDP

SEQ ID NO: 355 - protein, 246 aa, Artificial Sequence
  source: /note="Description of Artificial Sequence: Synthetic scFv sequence"
EIVLTQSPGSLAVSPGERVTMSCKSSQSVFFSSSQKNYLAWYQQIPGQSPRLLIYWASTRESGVPDRFTGSGSGTDFTLTISSVQPEDLAIYYCHQYLSSRTFGQGTKLEIKRGGGGSGGGGSSGGGSQVQLQQPGAEVVKPGASVKMSCKASGYTFTSYYIHWIKQTPGQGLEWVGVIYPGNDDISYNQKFQGKATLTADKSSTTAYMQLSSLTSEDSAVYYCAREVRLRYFDVWGQGTTVTVSS

SEQ ID NO: 356 - protein, 245 aa, Artificial Sequence
  source: /note="Description of Artificial Sequence: Synthetic scFv sequence"
EVQLVESGGGLVQPGGSLRLSCAASGFTFSSYAMSWVRQAPGKGLEWVSAISGSGGSTYYADSVKGRFTISRDNSKNTLYLQMNSLRAEDTAVYYCAKETDYYGSGTFDYWGQGTLVTVSSASGGGGSGGGGSGGGGSDIQMTQSPSSLSASVGDRVTISCRASQGIGIYLAWYQQRSGKPPQLLIHGASTLQSGVPSRFSGSGSGTDFTLTISSLQPEDFASYWCQQSNNFPPTFGQGTKVEIK

SEQ ID NO: 357 - protein, 267 aa, Artificial Sequence
  source: /note="Description of Artificial Sequence: Synthetic scFv sequence"
MALPVTALLLPLALLLHAARPEVQLQQSGPELVKPGASVKISCKASGYTFTDYNMHWVKQSHGKSLEWIGYIYPYNGGTGYNQKFKSKATLTVDNSSSTAYMDVRSLTSEDSAVYYCARGRPAMDYWGQGTSVTVSSGGGGSGGGGSGGGGSDIVLTQSPASLAVSLGQRATISCRASESVDNYGISFMNWFQQKPGQPPKLLIYAASNQGSGVPARFSGSGSGTDFSLNIHPMEEDDTAMYFCQQSKEVPWTFGGGTKLEIKRSDP

SEQ ID NO: 358 - protein, 266 aa, Artificial Sequence
  source: /note="Description of Artificial Sequence: Synthetic scFv sequence"
MALPVTALLLPLALLLHAARPEVQLVESGGGLVQPGGSLRLSCAASGFTFSSYAMSWVRQAPGKGLEWVSAISGSGGSTYYADSVKGRFTISRDNSKNTLYLQMNSLRAEDTAVYYCAKETDYYGSGTFDYWGQGTLVTVSSASGGGGSGGGGSGGGGSDIQMTQSPSSLSASVGDRVTISCRASQGIGIYLAWYQQRSGKPPQLLIHGASTLQSGVPSRFSGSGSGTDFTLTISSLQPEDFASYWCQQSNNFPPTFGQGTKVEIK

SEQ ID NO: 359 - protein, 272 aa, Artificial Sequence
  source: /note="Description of Artificial Sequence: Synthetic scFv sequence"
MALPVTALLLPLALLLHAARPQVQLVQSGAEVKKPGASVRVSCKASGYIFTNYYVHWVRQAPGQGLEWMGIISPSGGSPTYAQRLQGRVTMTRDLSTSTVYMELSSLTSEDTAVYFCARESRLRGNRLGLQSSIFDHWGQGTLVTVSSASGGGGSGGGGSGGGGSDIRMTQSPPSLSASVGDRVTIPCQASQDINNHLNWYQQKPGKAPQLLIYDTSNLEIGVPSRFSGSGSGTDFTLTISSLQPEDIATYYCQQYENLPLTFGGGTKVEIK

SEQ ID NO: 360 - protein, 266 aa, Artificial Sequence
  source: /note="Description of Artificial Sequence: Synthetic scFv sequence"
MALPVTALLLPLALLLHAARPQVQLVQSGAEVKKPGASVRVSCKASGYMFTDFFIHWVRQAPGQGLEWMGWINPNSGVTKYAQKFQGRVTMTRNTSISTAYMELSSLRSEDTAVYYCATWYSSGWYGIANIWGQGTMVTVSSASGGGGSGGGGSGGGGSDIQLTQSPSSLSASVGDRVTITCQASHDISNYLHWYQQKPGKAPKLLIYDASNLETGVPSRFTGSGSGTDFTLTIRSLQPEDVAAYYCQQSDDLPHTFGQGTKVDIK

SEQ ID NO: 361 - protein, 265 aa, Artificial Sequence
  source: /note="Description of Artificial Sequence: Synthetic scFv sequence"
MALPVTALLLPLALLLHAARPQVQLVQSGAEVKKPGESLKISCKGSGYSFTNYWIGWVRQMPGKGLEWMGIIYPGDSDTRYSPSFQGQVTISADKSISTAYLQWSSLKASDTAMYYCARHGPSSWGEFDYWGQGTLVTVSSASGGGGSGGGGSGGGGSDIRLTQSPSSLSASVGDRVTITCRASQSISSYLNWYQQKPGKAPKLLIYAASSLQSGVPSRFSGSGSGTDFTLTISSLQPEDFATYYCQQSYSTPLTFGGGTKVDIK

SEQ ID NO: 362 - protein, 271 aa, Artificial Sequence
  source: /note="Description of Artificial Sequence: Synthetic scFv sequence"
MALPVTALLLPLALLLHAARPQVQLVQSGAEVKKPGESLKISCKGSGYSFTSYWIGWVRQMPGKGLEWMGIIYPGDSDTRYSPSFQGQVTISADKSISTAYLQWSSLKASDTAMYYCARLGGSLPDYGMDVWGQGTMVTVSSASGGGGSGGGGSGGGGSEIVLTQSPLSLPVTPGEPASISCRSSQSLLHSNGYNYLDWYLQKPGQSPQLLIYLGSNRASGVPDRFSGSGSGTDFTLKISRVEAEDVGVYYCMQALQTLITFGQGTKVDIK

SEQ ID NO: 363 - protein, 271 aa, Artificial Sequence
  source: /note="Description of Artificial Sequence: Synthetic scFv sequence"
MALPVTALLLPLALLLHAARPQVQLVQSGAEVKKPGESLKISCKGSGYSFTSYWIGWVRQMPGKGLEWMGIIYPGDSDTRYSPSFQGQVTISADKSITTAYLQWSSLRASDSAMYYCARGGYSDYDYYFDFWGQGTLVTVSSASGGGGSGGGGSGGGGSEIVMTQSPLSLPVTPGEPASISCRSSQSLLHSNGYNYLDWYLQKPGQSPQLLIYLGSNRASGVPDRFSGSGSGTDFTLKISRVEAEDVGVYYCMQALQTPFTFGGGTKVEIK

SEQ ID NO: 364 - protein, 261 aa, Artificial Sequence
  source: /note="Description of Artificial Sequence: Synthetic scFv sequence"
MALPVTALLLPLALLLHAARPQVQLVQSGGDLAQPGRSLRLSCAASGFTFDDYAMHWVRQAPGKGLEWVAVIWPDGGQKYYGDSVKGRFTVSRDNPKNTLYLQMNSLRAEDTAIYYCVRHFNAWDYWGQGTLVTVSSASGGGGSGGGGSGGGGSDIQLTQSPSSLSAYVGGRVTITCQASQGISQFLNWFQQKPGKAPKLLISDASNLEPGVPSRFSGSGSGTDFTFTITNLQPEDIATYYCQQYDDLPLTFGGGTKVEIK

SEQ ID NO: 365 - protein, 270 aa, Artificial Sequence
  source: /note="Description of Artificial Sequence: Synthetic scFv sequence"
MALPVTALLLPLALLLHAARPQVQLVQSGGGLVQPGGSLRLSCAASGFTFSSYAMSWVRQAPGKGLEWVSAISGSGGSTYYADSVKGRFTISRDNSKNTLYLQMNSLRAEDTAVYYCAKEDTIRGPNYYYYGMDVWGQGTTVTVSSASGGGGSGGGGSGGGGSETTLTQSPSSVSASVGDRVSITCRASQDIDTWLAWYQLKPGKAPKLLMYAASNLQGGVPSRFSGSGSGTDFILTISSLQPEDFATYYCQQASIFPPTFGGGTKVDIK

SEQ ID NO: 366 - protein, 269 aa, Artificial Sequence
  source: /note="Description of Artificial Sequence: Synthetic scFv sequence"
MALPVTALLLPLALLLHAARPQVQLVQSGGGVVQPGKSLRLSCAASGFTFSIFAMHWVRQAPGKGLEWVATISYDGSNAFYADSVEGRFTISRDNSKDSLYLQMDSLRPEDTAVYYCVKAGDGGYDVFDSWGQGTLVTVSSASGGGGSGGGGSGGGGSEIVMTQSPLSLPVTPGEPASISCRSSQSLLHSNGYNYLDWYLQKPGQSPQLLIYLGSNRASGVPDRFSGSGSGTDFTLKISRVEAEDVGVYYCMQALQTPTFGPGTKVDIK

SEQ ID NO: 367 - protein, 246 aa, Artificial Sequence
  source: /note="Description of Artificial Sequence: Synthetic scFv sequence"
NIMLTQSPSSLAVSAGEKVTMSCKSSQSVFFSSSQKNYLAWYQQIPGQSPKLLIYWASTRESGVPDRFTGSGSGTDFTLTISSVQSEDLAIYYCHQYLSSRTFGGGTKLEIKRGGGGSGGGGSSGGGSQVQLQQPGAEVVKPGASVKMSCKASGYTFTSYYIHWIKQTPGQGLEWVGVIYPGNDDISYNQKFKGKATLTADKSSTTAYMQLSSLTSEDSAVYYCAREVRLRYFDVWGAGTTVTVSS

SEQ ID NO: 368 - protein, 251 aa, Artificial Sequence
  source: /note="Description of Artificial Sequence: Synthetic scFv sequence"
QVQLVQSGAEVKKPGASVRVSCKASGYIFTNYYVHWVRQAPGQGLEWMGIISPSGGSPTYAQRLQGRVTMTRDLSTSTVYMELSSLTSEDTAVYFCARESRLRGNRLGLQSSIFDHWGQGTLVTVSSASGGGGSGGGGSGGGGSDIRMTQSPPSLSASVGDRVTIPCQASQDINNHLNWYQQKPGKAPQLLIYDTSNLEIGVPSRFSGSGSGTDFTLTISSLQPEDIATYYCQQYENLPLTFGGGTKVEIK

SEQ ID NO: 369 - protein, 245 aa, Artificial Sequence
  source: /note="Description of Artificial Sequence: Synthetic scFv sequence"
QVQLVQSGAEVKKPGASVRVSCKASGYMFTDFFIHWVRQAPGQGLEWMGWINPNSGVTKYAQKFQGRVTMTRNTSISTAYMELSSLRSEDTAVYYCATWYSSGWYGIANIWGQGTMVTVSSASGGGGSGGGGSGGGGSDIQLTQSPSSLSASVGDRVTITCQASHDISNYLHWYQQKPGKAPKLLIYDASNLETGVPSRFTGSGSGTDFTLTIRSLQPEDVAAYYCQQSDDLPHTFGQGTKVDIK

SEQ ID NO: 370 - protein, 244 aa, Artificial Sequence
  source: /note="Description of Artificial Sequence: Synthetic scFv sequence"
QVQLVQSGAEVKKPGESLKISCKGSGYSFTNYWIGWVRQMPGKGLEWMGIIYPGDSDTRYSPSFQGQVTISADKSISTAYLQWSSLKASDTAMYYCARHGPSSWGEFDYWGQGTLVTVSSASGGGGSGGGGSGGGGSDIRLTQSPSSLSASVGDRVTITCRASQSISSYLNWYQQKPGKAPKLLIYAASSLQSGVPSRFSGSGSGTDFTLTISSLQPEDFATYYCQQSYSTPLTFGGGTKVDIK

SEQ ID NO: 371 - protein, 250 aa, Artificial Sequence
  source: /note="Description of Artificial Sequence: Synthetic scFv sequence"
QVQLVQSGAEVKKPGESLKISCKGSGYSFTSYWIGWVRQMPGKGLEWMGIIYPGDSDTRYSPSFQGQVTISADKSISTAYLQWSSLKASDTAMYYCARLGGSLPDYGMDVWGQGTMVTVSSASGGGGSGGGGSGGGGSEIVLTQSPLSLPVTPGEPASISCRSSQSLLHSNGYNYLDWYLQKPGQSPQLLIYLGSNRASGVPDRFSGSGSGTDFTLKISRVEAEDVGVYYCMQALQTLITFGQGTKVDIK

SEQ ID NO: 372 - protein, 250 aa, Artificial Sequence
  source: /note="Description of Artificial Sequence: Synthetic scFv sequence"
QVQLVQSGAEVKKPGESLKISCKGSGYSFTSYWIGWVRQMPGKGLEWMGIIYPGDSDTRYSPSFQGQVTISADKSITTAYLQWSSLRASDSAMYYCARGGYSDYDYYFDFWGQGTLVTVSSASGGGGSGGGGSGGGGSEIVMTQSPLSLPVTPGEPASISCRSSQSLLHSNGYNYLDWYLQKPGQSPQLLIYLGSNRASGVPDRFSGSGSGTDFTLKISRVEAEDVGVYYCMQALQTPFTFGGGTKVEIK

SEQ ID NO: 373 - protein, 240 aa, Artificial Sequence
  source: /note="Description of Artificial Sequence: Synthetic scFv sequence"
QVQLVQSGGDLAQPGRSLRLSCAASGFTFDDYAMHWVRQAPGKGLEWVAVIWPDGGQKYYGDSVKGRFTVSRDNPKNTLYLQMNSLRAEDTAIYYCVRHFNAWDYWGQGTLVTVSSASGGGGSGGGGSGGGGSDIQLTQSPSSLSAYVGGRVTITCQASQGISQFLNWFQQKPGKAPKLLISDASNLEPGVPSRFSGSGSGTDFTFTITNLQPEDIATYYCQQYDDLPLTFGGGTKVEIK

SEQ ID NO: 374 - protein, 249 aa, Artificial Sequence
  source: /note="Description of Artificial Sequence: Synthetic scFv sequence"
QVQLVQSGGGLVQPGGSLRLSCAASGFTFSSYAMSWVRQAPGKGLEWVSAISGSGGSTYYADSVKGRFTISRDNSKNTLYLQMNSLRAEDTAVYYCAKEDTIRGPNYYYYGMDVWGQGTTVTVSSASGGGGSGGGGSGGGGSETTLTQSPSSVSASVGDRVSITCRASQDIDTWLAWYQLKPGKAPKLLMYAASNLQGGVPSRFSGSGSGTDFILTISSLQPEDFATYYCQQASIFPPTFGGGTKVDIK

SEQ ID NO: 375 - protein, 248 aa, Artificial Sequence
  source: /note="Description of Artificial Sequence: Synthetic scFv sequence"
QVQLVQSGGGVVQPGKSLRLSCAASGFTFSIFAMHWVRQAPGKGLEWVATISYDGSNAFYADSVEGRFTISRDNSKDSLYLQMDSLRPEDTAVYYCVKAGDGGYDVFDSWGQGTLVTVSSASGGGGSGGGGSGGGGSEIVMTQSPLSLPVTPGEPASISCRSSQSLLHSNGYNYLDWYLQKPGQSPQLLIYLGSNRASGVPDRFSGSGSGTDFTLKISRVEAEDVGVYYCMQALQTPTFGPGTKVDIK

SEQ ID NO: 376 - protein, 511 aa, Artificial Sequence
  source: /note="Description of Artificial Sequence: Synthetic scFv sequence"
QVQLVQSGAEVKKPGESVKVSCKASGYTFTNYGMNWVKQAPGQGLEWMGWINTYTGEPTYADKFQGRVTMTTDTSTSTAYMEIRNLGGDDTAVYYCARWSWSDGYYVYFDYWGQGTSVTVSSGGGGSGGGGSGGGGSDIVMTQSPDSLTVSLGERTTINCKSSQSVLDSSTNKNSLAWYQQKPGQPPKLLLSWASTRESGIPDRFSGSGSGTDFTLTIDSPQPEDSATYYCQQSAHFPITFGQGTRLEIKSGGGGSEVQLVESGGGLVQPGGSLKLSCAASGFTFNKYAMNWVRQAPGKGLEWVARIRSKYNNYATYYADSVKDRFTISRDDSKNTAYLQMNNLKTEDTAVYYCVRHGNFGNSYISYWAYWGQGTLVTVSSGGGGSGGGGSGGGGSQTVVTQEPSLTVSPGGTVTLTCGSSTGAVTSGNYPNWVQQKPGQAPRGLIGGTKFLAPGTPARFSGSLLGGKAALTLSGVQPEDEAEYYCVLWYSNRWVFGGGTKLTVLHHHHHH

SEQ ID NO: 377 - protein, 728 aa, Artificial Sequence
  source: /note="Description of Artificial Sequence: Synthetic scFv sequence"
QVQLVQSGAEVKKPGESVKVSCKASGYTFTNYGMNWVKQAPGQGLEWMGWINTYTGEPTYADKFQGRVTMTTDTSTSTAYMEIRNLGGDDTAVYYCARWSWSDGYYVYFDYWGQGTSVTVSSGGGGSGGGGSGGGGSDIVMTQSPDSLTVSLGERTTINCKSSQSVLDSSTNKNSLAWYQQKPGQPPKLLLSWASTRESGIPDRFSGSGSGTDFTLTIDSPQPEDSATYYCQQSAHFPITFGQGTRLEIKSGGGGSEVQLVESGGGLVQPGGSLKLSCAASGFTFNKYAMNWVRQAPGKGLEWVARIRSKYNNYATYYADSVKDRFTISRDDSKNTAYLQMNNLKTEDTAVYYCVRHGNFGNSYISYWAYWGQGTLVTVSSGGGGSGGGGSGGGGSQTVVTQEPSLTVSPGGTVTLTCGSSTGAVTSGNYPNWVQQKPGQAPRGLIGGTKFLAPGTPARFSGSLLGGKAALTLSGVQPEDEAEYYCVLWYSNRWVFGGGTKLTVLAPELLGGPSVFLFPPKPKDTLMISRTPEVTCVVVDVSHEDPEVKFNWYVDGVEVHNAKTKPREEQYGSTYRVVSVLTVLHQDWLNGKEYKCKVSNKALPAPIEKTISKAKGQPREPQVTTLPPSREEMTKNQVSLTCLVKGFYPSDIAVEWESNGQPENNYDTTPPVLDSDGSFFLYSDLTVDKSRWQQGNVFSCSVMHEALHNHYTQKSLSLSPGKHHHHHH

SEQ ID NO: 378 - protein, 728 aa, Artificial Sequence
  source: /note="Description of Artificial Sequence: Synthetic scFv sequence"
QVQLVQSGAEVKKPGESVKVSCKASGYTFTNYGMNWVKQAPGQGLEWMGWINTYTGEPTYADKFQGRVTMTTDTSTSTAYMEIRNLGGDDTAVYYCARWSWSDGYYVYFDYWGQGTSVTVSSGGGGSGGGGSGGGGSDIVMTQSPDSLTVSLGERTTINCKSSQSVLDSSTNKNSLAWYQQKPGQPPKLLLSWASTRESGIPDRFSGSGSGTDFTLTIDSPQPEDSATYYCQQSAHFPITFGQGTRLEIKSGGGGSEVQLVESGGGLVQPGGSLKLSCAASGFTFNKYAMNWVRQAPGKGLEWVARIRSKYNNYATYYADSVKDRFTISRDDSKNTAYLQMNNLKTEDTAVYYCVRHGNFGNSYISYWAYWGQGTLVTVSSGGGGSGGGGSGGGGSQTVVTQEPSLTVSPGGTVTLTCGSSTGAVTSGNYPNWVQQKPGQAPRGLIGGTKFLAPGTPARFSGSLLGGKAALTLSGVQPEDEAEYYCVLWYSNRWVFGGGTKLTVLAPELLGGPSVFLFPPKPKDTLMISRTPEVTCVVVDVSHEDPEVKFNWYVDGVEVHNAKTKPREEQYNSTYRVVSVLTVLHQDWLNGKEYKCKVSNKALPAPIEKTISKAKGQPREPQVTTLPPSREEMTKNQVSLTCLVKGFYPSDIAVEWESNGQPENNYDTTPPVLDSDGSFFLYSDLTVDKSRWQQGNVFSCSVMHEALHNHYTQKSLSLSPGKHHHHHH

SEQ ID NO: 379 - protein, 214 aa, Artificial Sequence
  source: /note="Description of Artificial Sequence: Synthetic scFv sequence"
DIQMTQSPSSLSVSVGERVTITCRASENIRSNLAWYQQKPGKSPKLLVNVATNLADGVPSRFSGSGSGTDYSLKINSLQPEDFGTYYCQHYWGTTWTFGQGTKLEIKRTVAAPSVFIFPPSDEQLKSGTASVVCLLNNFYPREAKVQWKVDNALQSGNSQESVTEQDSKDSTYSLSSTLTLSKADYEKHKVYACEVTHQGLSSPVTKSFNRGEC

SEQ ID NO: 380 - protein, 115 aa, Artificial Sequence
  source: /note="Description of Artificial Sequence: Synthetic scFv sequence"
QVQVQESGPGLVAPSQTLSITCTVSGFSLTTSGVSWVRQPPGKGLEWLGVIWGDGSTNYHSSLKSRLSIKKDHSKSQVFLKLNSLTAADTATYYCAKGGYSLAHWGQGTLVTVSS

SEQ ID NO: 381 - protein, 68 aa, Artificial Sequence
  source: /note="Description of Artificial Sequence: Synthetic scFv sequence"
FWVLVVVGGVLACYSLLVTVAFIIFWVRSKRSRLLHSDYMNMTPRRPGPTRKHYQPYAPPRDFAAYRS

SEQ ID NO: 382 - protein, 234 aa, Artificial Sequence
  source: /note="Description of Artificial Sequence: Synthetic scFv sequence"
QVNLRESGGGLVQPGGFLRLSCAAFGFTFSGYWMSWVHPAPGKGLEWVANIKQDGSEKFYVDSVKGRFTISRDNAKNSLFLQMNSLRAEDTAVYFCARGLLSDYWGQGTLVPVSSGGGGSGGGGSGGGGSNFMLTQPPSVSVAPGKTASLTCGGYNIGTKSVHWYQQKPGQAPWWHDDSDRPSGIPERFSGSNSGTTATLIIRVEAGDEADYYCQAWDSISEEWFGGGTKLTVL

SEQ ID NO: 383 - protein, 243 aa, Artificial Sequence
  source: /note="Description of Artificial Sequence: Synthetic scFv sequence"
QVQLLESGGGWQPGTSLRLSCAASGFTFSNYAINWVRQAAGKGLEWVSGISGSGVSTSYADSVKGRFTVSRDNSKNTLYLQMNSLRVEDTALYYCAKNGGGPEYLQHWGQGTLVTVSSGGGGSGGGGSGGGGSQSVLTQPPSASGTPGQRVTISCSGSSSNIGNNTVNWSRQLPGTAPKLLIYSNDQRPSGVPDRFSGSKSGTSASLAITGLQPEDEADYYCGTWDSSLSAYVFGTGTKLTVL

SEQ ID NO: 384 - protein, 240 aa, Artificial Sequence
  source: /note="Description of Artificial Sequence: Synthetic scFv sequence"
QVQLLQSAGGLVQPGGSLRLSCAASGFTFSTYAMNWVRQAPGKGLEWVSGISGSGGSTNYADSVKGRFTISRDSSKNTLFLQMNSLRAEDTAVYYCAKDYGSGWYDYWGQGTLVTVSSGGGGSGGGGSGGGGSSSELTQDPAVSVALGQTVRITCQGDSLRSYYASWYQERPGQAPLLVIYGRNERPSGIPDRFSASSSGNTASLTITGAQAEDEADYYCQVWDSFNEQWFGGGTKLTVL

SEQ ID NO: 385 - protein, 245 aa, Artificial Sequence
  source: /note="Description of Artificial Sequence: Synthetic scFv sequence"
QVQLLQSGGGLVQPGGSLRLSCAASGFTFSSYAMSWVRQAPGKGLEWVSAISGSGGSTYYTDSVKGRFTISRDNSKNTLYLQMNSLRAEDTAVYYCAKSHDYGDYAGFDYWGQGTLVTVSSGGGGSGGGGSGGGGSHVILTQDPAVSVALGQTVRITCQGDSLKSYYASWYQQKPGQAPVLVIYGKNNRPSGIPDRFSGSSSGTTASLTITGAQAEDEADYYCHSRDSSGTHLRVFGGGTKLTVL

SEQ ID NO: 386 - protein, 241 aa, Artificial Sequence
  source: /note="Description of Artificial Sequence: Synthetic scFv sequence"
QVQLQESGGGLVKPGESLRLSCAASGFTFSDHYMDWVRQAPGKGLEWVAYIRYDGSTKYYADSVKGRFTISRDNSKNTLYLQMNSLRPEDTAFYYCARLIAEAEGWFDPWGQGTLVTVSSGGGGSGGGGSGGGGSNFMLTQPPSVSVAPGKTARITCGGNNIGSKSVYWYQQKPGQAPVLWYDDSDRPSGIPERFSGSNSGNTATLTISRVEAGDEADYYCQVWDSSSDHWFGGGTKVTVL

SEQ ID NO: 387 - protein, 242 aa, Artificial Sequence
  source: /note="Description of Artificial Sequence: Synthetic scFv sequence"
QVQLQESGGGLVKPGGPLRLSCAASGFTFSSYGMYWVRQAPGKGLEWVSTLSRSGSGTYYADSVKGRFTISRBNSKNTLYLQMNSLRAEDTAVYYCASIAVAGNYFDYWGQGTLVTVSSGGGGSGGGGSGGGGSSYVLTQDPAVSVALGQTVRITCQGDSLRSYYASWYQERPGQAPLLVIYGKNNRPSGIPDRFSGSNSGSTATLTISRVEAGDEGDYYCQVWDSINEQVVFGGGTKVTVL

SEQ ID NO: 388 - protein, 241 aa, Artificial Sequence
  source: /note="Description of Artificial Sequence: Synthetic scFv sequence"
QVQLQESGGGLVKPGGPLRLSCAASGFTFSSYGMYWVRQAPGKGLEWVSTLSRSGSGTYYAESVKGRFTISRDNSKNTLYFQMNSLRAEDTAVYYCASIAVAGNYFEYWGQGTLVTVSSGGGGSGGGGSGGGGSSYVLTQDPAVSVALGQTVRITCQGDSLRSYYASWYQERPGQAPLLVIYGKNNRPSGIPDRFSGSNSGSTATLTISRVEAGDEGDYYCQVWDSINEQWFGGGTKVTVL

SEQ ID NO: 389 - protein, 244 aa, Artificial Sequence
  source: /note="Description of Artificial Sequence: Synthetic scFv sequence"
QVQLQESGGGLVKPGGSLRLSCAASGFTFSNAWMNWVRQAPGKGLEWVGRIKSKTDEGTTDYAAPVKGRFSISRDDSKNTLYLQMNSLKTEDTGVYYCTATKGLGGSKLGQGTLVTVSSGGGGSGGGGSGGGGSQSVLTQPPSASGTPGQRVTISCSGSSSNIGNNTVNWSRQLPGTAPKLLIYSNDQRPSGVPDRFSGSKSGTSASLAITGLQPEDEADYYCGTWDSSLSAYVFGTGTKLTVL

SEQ ID NO: 390 - protein, 245 aa, Artificial Sequence
  source: /note="Description of Artificial Sequence: Synthetic scFv sequence"
QVQLQESGGGLVKPGGSLRLSCAASGFTSSSYAMHWVRQAPGKGLEYVSAIGGNGGTYYADSVKGRFTISRDNSKNTLYLQMNSLRAEDTAVYYCAKEGEQWLEYRYYYGMDVWGQGTTVTVSSGGGGSGGGGSGGGGSSSELTQDPAVSVALGQTVRITCQGDSLRSYYASWYQQKPGQAPSLVIYGENSRPSGIPDRFSGSSSGNTASLTITGAQAENEADYYCQAWDSSTAWFGGGTKLTVL

SEQ ID NO: 391 - protein, 243 aa, Artificial Sequence
  source: /note="Description of Artificial Sequence: Synthetic scFv sequence"
QVQLQESGGGLVQLGGSLRLSCAASGFTFSSYAMSWVRQAPGKGLEWVSAISGSGGSTYYADSVKGRFTISRDNSKNTLYLQMSSLRAEDTAFYYCANSAYTGGWYDYWGHGTLVTVSSGGGGSGGGGSGGGGSSSELTQDPAVSVALGQTVKITCQGDSLRTYYASWYQQRPGQAPVLVIYGENSRPSGIPDRFSGSSSGNTASLTITGAQAEDEADYYCNSRDSSGNHLRVFGGGTKLTVL

SEQ ID NO: 392 - protein, 245 aa, Artificial Sequence
  source: /note="Description of Artificial Sequence: Synthetic scFv sequence"
QVQLQESGGGLVQPGGSLRLSCAASGFTFSSYAMSWVRQAPGKGLEWVAVISYDGSNKYYADSVKGRFTISRDNSKNTLYLQMNSLRAEDTAVYYCVRGDRSYGAEYFQHWGQGTLVTVSSGGGGSGGGGSGGGGSSSELTQDPAVSVASGQTVRITCQGDSLRSYYASWYQQKPGQAPLLVIYGKNIRPSGIPDRFSGSTSGNSASLTITGAQAEDEADYYCNSRDSSGNRNWVFGGGTKLTVL

SEQ ID NO: 393 - protein, 238 aa, Artificial Sequence
  source: /note="Description of Artificial Sequence: Synthetic scFv sequence"
QVQLQESGGGLVQPGGSLRLSCAASGTFSSYAMHWVRQAPGKGLEWVAVISYDGSNKYYADSVKGRFTISRDNSKNTLYLQMNSLRAEDTAVYYCARFSSGWYYFDYWGQGTLVTVSSGGGGSGGGGSGGGGSDIQMTQSPSFLSASVGDRITITCRASNDISSYFAWYQQKPGKAPKPLIYAASTLQSGVPSRFSGSGTEFTLTISSLQPEDFATYYCQQLGSYPLTFGGGTKLEIK

SEQ ID NO: 394 - protein, 239 aa, Artificial Sequence
  source: /note="Description of Artificial Sequence: Synthetic scFv sequence"
QVQLQESGGGLVQPGGSLRLSCSASGFTFGTYAMRWVRQTSGKGLEWVSGIGVSGDAYYTDSVRGRFTISRDNSKNTLYLQMNTLRAEDTAYYCTRKSSTTSNDYWGRGTLVTVSSGGGGSGGGGSGGGGSSYVLTQDPAVSVALGQTVRITCQGDNIGSKSVHWYQQKPGQAPVLVVYDDSDRPSGIPERFSGSNSGTTATLTISSVEAGDEADYYCQAWDSISEHVIFGGGTKVTVL

SEQ ID NO: 395 - protein, 237 aa, Artificial Sequence
  source: /note="Description of Artificial Sequence: Synthetic scFv sequence"
QVQLQESGGTLVQPGGSLRLSCAASGFTFSSYAMSWVRQAPGRGLEWVSTISGSGGSTYYADSVKGRFTISRDNSKNTLYLQMNSLRAEDTAVYYCAKGAYSGSHWGQGTLVTVSSGGGGSGGGGSGGGGSSSELTQDPAVSVALGQTVRITCQGDSLRSYYASWYQQKPGQAPSLVIYGENSRPSGIPDRFSGSSSGNTASLTITGAQAENEADYYCQAWDSSTAWFGGGTKLTVL

SEQ ID NO: 396 - protein, 235 aa, Artificial Sequence
  source: /note="Description of Artificial Sequence: Synthetic scFv sequence"
QVQLQESGGTLVQPGGSLRLSCAASGFTFSSYAMSWVRQAPGRGLEWVSTISGSGGSTYYADSVKGRFTISRDNSKNTLYLQMNSLRAEDTAVYYCAKGAYSGSYWGQGTLVTVSSGGGGSGGGGSGGGGSSSELTQDPAVSVALGQTVRITCQGDSLRSYYASWYQQKPGQAPSLVIYGENSRPSGIPDRFSGSSSGNTASLIGAQAENEADYYCQAWDSSTAWFGGGTKLTVL

SEQ ID NO: 397 - protein, 244 aa, Artificial Sequence
  source: /note="Description of Artificial Sequence: Synthetic scFv sequence"
QVQLVESGAEVKKPGASVKVSCKASGYTFTSYGISWVRQAPGQGLEWMGWISAYNGNTNYAQKLQGRVTMTTDTSTSTAYMELRSLRSDDTAVYYCARPIYDSSGYDAFDIWGQGTMVTVSSGGGGSGGGGSGGGGSDIVMTQSPSTLSASIGDRVTITCRASEGIYHWLAWYQQKPGKAPKLLIYKASSLASGAPSRFSGSGSGTDFTLTISSLQPDDFATYYCQQYHTISRTFGPGTKVDIK

SEQ ID NO: 398 - protein, 244 aa, Artificial Sequence
  source: /note="Description of Artificial Sequence: Synthetic scFv sequence"
QVQLVESGGGLVKPGGSLRLSCAASGFTFSSYAMHWVRQAPGKGLEWVAVISYDGSNKYYADSVKGRFTISRDNSKNTLYLQMNSLRAEDTAVYFCVRPSDSGWSFEHWGQGTLVPVSSGGGGSGGGGSGGGGSQSVLTQPPSASGTPGQRVTISCSGSSSNIGNNTVNWSRQLPGTAPKLLIYSNDQRPSGVPDRFSGSKSGTSASLAITGLQPEDEADYYCGTWDSSLSAYVFGTGTKLTVL

SEQ ID NO: 399 - protein, 237 aa, Artificial Sequence
  source: /note="Description of Artificial Sequence: Synthetic scFv sequence"
QVQLVESGGGLVQPGGSLRLSCAASGFTFSSYAMGWVRQAPGKGLEWVSAISGSGGSTYYADSVKGRFTISRDNSKDTLYLQMNSLRAEDTAVYYCASRSLLDYWGQGTLVTVSSGGGGSGGGGSGGGGSNFMLTQDPAVSVALGQTVRITCQGDSLRSYYASWYQQKPGQAPLLVIYGKNNRPSGIPDRFSGSSSGNTASLTITGAQAEDEADYYCNSRDSSGNPVFGGGTKVTVL

SEQ ID NO: 400 - protein, 245 aa, Artificial Sequence
  source: /note="Description of Artificial Sequence: Synthetic scFv sequence"
QVQLVESGGGLVQPGGSLRLSCAASGFTFSSYAMSWVHQAPGKGLEWVSAISGSGGSTYYADSVKGRFTISRDNSKNTLYLQMNSLRAEDTAVYYCAKTYYGFWSGYYDYLGQGTLVTVSSGGGGSGGGGSGGGGSSSELTQDPAVSVGLGQTVTITCQGDSLRSYYANWYQQKPGQAPILVIYGENNRPSGIPDRFSGSSSGNTASLTITGAQAEDEADYYCHSRDSSGTHLRVFGGGTKLTVL

SEQ ID NO: 401 - protein, 237 aa, Artificial Sequence
  source: /note="Description of Artificial Sequence: Synthetic scFv sequence"
QVQLVESGGGLVQPGGSLRLSCAASGFTFSSYAMSWVRQAPGKGLEWVSAISGSGGSTYYADSVKGRFTISRDNSKDTLYLQMNSLRAEDTAVYYCASRSLLDYWGQGTLVTVSSGGGGSGGGGSGGGGSNFMLTQDPAVSVALGQTVRITCQGDSLRSYYASWYQQKPGQAPLLVIYGKNNRPSGIPDRFSGSSSGNTASLTITGAQAEDEADYYCNSRDSSGNPVFGGGTKVTVL

SEQ ID NO: 402 - protein, 244 aa, Artificial Sequence
  source: /note="Description of Artificial Sequence: Synthetic scFv sequence"
QVQLVESGGGWQPGRSLRLSCAASGFTFSSFGMHWVRRAPGKGLEWVAVISYDGSNQYYADSVKGRFTISRDNSKNTLYLQMNSLRAEDTAVYYCGSRPGGGYASGSTVAYWGQGTPVTVSSGGGGSGGGGSGGGGSSSELTQDPAVSVALGQTVRITCQGDSLRSYYASWYQQKPGQAPLLVIYGQNIRPSGIPDRFSGSSSGNSASLTITGAQAEDEADYYCHSRDSSGKYVFGVGTKVTVL

SEQ ID NO: 403 - protein, 247 aa, Artificial Sequence
  source: /note="Description of Artificial Sequence: Synthetic scFv sequence"
QVQLVESGGGWQPGRSLRLSCTASGFTFSSYGMHWVRQAPGKGLEWVAVISYDGSNKYYADSVKGRFTISRDNSKNTLYLQMNSLRAEDTAVYYCARGGRYSSNWFSYYYYGMDVWGQGTTVTVSSGGGGSGGGGSGGGGSNFMLTQPPSVSVAPGKTARITCGGNNIGSKSVYWYQQKPGQAPVLWYDDSDRPSGIPERFSGSNSGNTATLTISRVEAGDEADYYCQVWDSSSDHWFGGGTKVTVL

SEQ ID NO: 404 - protein, 241 aa, Artificial Sequence
  source: /note="Description of Artificial Sequence: Synthetic scFv sequence"
QVQLVQSGGGVVQPGRSLRLSCAATGIPFSGSGMHWVRQAPGKGLEWVTMIWYDGSNKFYADSVKGRFTISRDNSKNTLYLQMDSLRAEDTAVYFCARDKGVRSMDVWGLGTTVTVSSGGGGSGGGGSGGGGSNFMLTQPPSVSVAPGQTAKITCDGYSIRTKSVHWYQQKPGQAPVVVVHDDSDRPSGIPERFSGSNSGTTATLTISRVEAGDEADYYCQAWDSISEEVVFGGGTKLTVL

SEQ ID NO: 405 - protein, 324 aa, Artificial Sequence
  source: /note="Description of Artificial Sequence: Synthetic scFv sequence"
MALPVTALLLPLALLLHAARPDIQVTQSPSSLSASLGERISLTCRTSQDISNYLNWFQQKPDGTFKRLIYATSSLDSGVPKRFSGSGSGSDYSLTISSLESEDFADYYCLQYASYPFTFGSGTKLEIKGGGGSGGGGSGGGGSEVQLQESGPGLVKPSQTLSLTCSVTGYSITSGYYWHWIRQFPGNKLQWMGYISYSGFTNYKTSLINRISITHDTSENQFFLNLNSVTTEDTATYYCAGDRTGSWFAYWGQGTLVTVSATTTPAPRPPTPAPTIASQPLSLRPEACRPAAGGAVHTRGDFACDIYIWAPLAGTLSLVITLYC

SEQ ID NO: 406 - protein, 252 aa, Artificial Sequence
  source: /note="Description of Artificial Sequence: Synthetic scFv sequence"
DIVLTQSPASLAVSLGQRATISCKASQSVDYDGDGYMDWYQQKPGQPPKLLIFAASNLKSGIPARFSGSGSGTDFTLNIHPVEEEDAATYYCQQTNEYPWTFGGGTKLEIKGSTSGSGKPGSGEGSTKGQIQLVQSGPELKKPGETVKISCKASGYTFTDYSMHWVKQAPGEGLKWMGWINTETGEPTYADDFKGRFAFSLETSASTAYLQINNLKNEDTATYFCYYGSYWGQGTLVTVSAGGGGSGGGGSC

SEQ ID NO: 407 - protein, 213 aa, Artificial Sequence
  source: /note="Description of Artificial Sequence: Synthetic scFv sequence"
DIQLTQSPSSLSASVGDRVTITCKASQDVGTSVAWYQQKPGKAPKLLIYWTSTRHTGVPSRFSGSGSGTDFTFTISSLQPEDIATYYCQQYSLYRSFGQGTKVEIKRTVAAPSVFIFPPSDEQLKSGTASVVCLLNNFYPREAKVQWKVDNALQSGNSQESVTEQDSKDSTYSLSSTLTLSKADYEKHKVYACEVTHQGLSSPVTKSFNRGEC

SEQ ID NO: 408 - protein, 257 aa, Artificial Sequence
  source: /note="Description of Artificial Sequence: Synthetic scFv sequence"
MSVPTQVLGLLLLWLTGARCDIQMTQSPASLSASVGDTVTITCRASENIYSYLAWYQQKQGKSPQLLVYNAKALSEGVPSRFSGSGSGTQFSLRINSLQPEDFGDYYCQHHYNSPYTFGGGTKLEIKGSTSGSGKSSEGKGQIQLVQSGPELKKPGETVKISCKASGYSFTNDGINWVKQAPGKGFKYMGWINTITGEPTYTEDFKGRFAFSLETSASTAYLQINNLKDEDTATFFCAKGTGTSAYWGQGTLVTVSA

SEQ ID NO: 409 - protein, 256 aa, Artificial Sequence
  source: /note="Description of Artificial Sequence: Synthetic scFv sequence"
DILLTQSPVILSVSPGERVSFSCRASQSIGTNIHWYQQRTNGSPRLLIKYASESISGIPSRFSGSGSGTDFTLSINSVESEDIADYYCQQNNNWPTTFGAGTKLELKRGSTSGSGKPGSGEGSTKGQVQLKQSGPGLVQPSQSLSITCTVSGFSLTNYGVHWVRQSPGKGLEWLGVIWSGGNTDYNTPFTSRLSINKDNSKSQVFFKMNSLQSNDTAIYYCARALTYYDYEFAYWGQGTLVTVSAGGGGSGGGGSC

SEQ ID NO: 410 - protein, 234 aa, Artificial Sequence
  source: /note="Description of Artificial Sequence: Synthetic scFv sequence"
DIQMTQSPSSLSASVGDRVTITCKAGQNVGTSVAWFQQKPGKAPKSLIYSASYRYSGVPSRFSGSGSGTDFTLTISSLQPEDFATYYCQQYITYPYTFGGGTKVEIKGGGGSGGGGSGGGGSEVQLLESGGGLVQPGGSLRLSCAASGFTFSRYWMSWVRQAPGKGLEWVSEINPDSSTIQYTPSLKARFTISRDNSKNTLYLQMNSLRAEDTAVYYCTGPAYWGQGTLVTVSS

SEQ ID NO: 411 - protein, 249 aa, Artificial Sequence
  source: /note="Description of Artificial Sequence: Synthetic scFv sequence"
EIVLTQSPATLSLSPGERATLSCSVSSSISSSNLHWYQQKPGQAPRLLIYGTSNLASGIPARFSGSGSGTDFTLTISSLEPEDFAVYYCQQWSSYPHTFGGGTKVEIKGGGGSGGGGSGGGGSQVQLVQSGAEVKKPGASVKVSCKASGYTFTNYLIEWVRQAPGQGLEWMGLINPGSGGTNYNEKFKGRVTMTTDTSTSTAYMELRSLRSDDTAVYYCARRSPLGSWIYYAYDGVAYWGQGTLVTVSS

SEQ ID NO: 412 - protein, 480 aa, Artificial Sequence
  source: /note="Description of Artificial Sequence: Synthetic scFv sequence"
MALPVTALLLPLALLLHAARPDIQMTQSPSSLSASVGDRVTITCKAGQNVGTSVAWFQQKPGKAPKSLIYSASYRYSGVPSRFSGSGSGTDFTLTISSLQPEDFATYYCQQYITYPYTFGGGTKVEIKGGGGSGGGGSGGGGSEVQLLESGGGLVQPGGSLRLSCAASGFTFSRYWMSWVRQAPGKGLEWVSEINPDSSTIQYTPSLKARFTISRDNSKNTLYLQMNSLRAEDTAVYYCTGPAYWGQGTLVTVSSSSTTTPAPRPPTPAPTIASQPLSLRPEACRPAAGGAVHTRGLDFACDIYIWAPLAGTCGVLLLSLVITLYCKRGRKKLLYIFKQPFMRPVQTTQEEDGCSCRFPEEEEGGCELRVKFSRSADAPAYKQGQNQLYNELNLGRREEYDVLDKRRGRDPEMGGKPRRKNPQEGLYNELQKDKMAEAYSEIGMKGERRRGKGHDGLYQGLSTATKDTYDALHMQALPPR

SEQ ID NO: 413 - protein, 493 aa, Artificial Sequence
  source: /note="Description of Artificial Sequence: Synthetic scFv sequence"
MALPVTALLLPLALLLHAARPEIVLTQSPATLSLSPGERATLSCSVSSSISSSNLHWYQQKPGQAPRLLIYGTSNLASGIPARFSGSGSGTDFTLTISSLEPEDFAVYYCQQWSSYPHTFGGGTKVEIKGGGGSGGGGSGGGGSQVQLVQSGAEVKKPGASVKVSCKASGYTFTNYLIEWVRQAPGQGLEWMGLINPGSGGTNYNEKFKGRVTMTTDTSTSTAYMELRSLRSDDTAVYYCARRSPLGSWIYYAYDGVAYWGQGTLVTVSSTTTPAPRPPTPAPTIASQPLSLRPEACRPAAGGAVHTRGLDFACDIYIWAPLAGTCGVLLLSLVITLYCKRGRKKLLYIFKQPFMRPVQTTQEEDGCSCRFPEEEEGGCELRVKFSRSADAPAYKQGQNQLYNELNLGRREEYDVLDKRRGRDPEMGGKPRRKNPQEGLYNELQKDKMAEAYSEIGMKGERRRGKGHDGLYQGLSTATKDTYDALHMQALPPR

SEQ ID NO: 414 - protein, 242 aa, Artificial Sequence
  source: /note="Description of Artificial Sequence: Synthetic scFv sequence"
SQVQLQQPGAELVRPGASVKLSCKASGYSFTTYWMNWVKQRPGQGLEWIGMIHPSDSETRLNQKFKDKATLTVDKSSSTAYMQLSSPTSEDSAVYYCARSTMIATRAMDYWGQGTSVTVSGGGGSGGGGSGGGGSDIVMTQSQKSMSTSVGDRVSITCKASQDVITGVAWYQQKPGQSPKLLIYSASYRYTGVPDRFTGSGSGTDFTFTISNVQAEDLAVYYCQQHYSTPLTFGAGTKLELK

SEQ ID NO: 415 - protein, 244 aa, Artificial Sequence
  source: /note="Description of Artificial Sequence: Synthetic scFv sequence"
EVQLQQSGPELVKPGASMKISCKASGYSFTGYTMNWVKQSHGKNLEWIGLINPYNGGTIYNQKFKGKATLTVDKSSSTAYMELLSLTSEDSAVYYCARDYGFVLDYWGQGTTLTVSSGGGGSGGGGSGGGGSGGGGSQIVLTQSPSIMSVSPGEKVTITCSASSSVSYMHWFQQKPGTSPKLCIYSTSNLASGVPARFSGRGSGTSYSLTISRVAAEDAATYYCQQRSNYPPWTFGGGTKLEIK

SEQ ID NO: 416 - protein, 244 aa, Artificial Sequence
  source: /note="Description of Artificial Sequence: Synthetic scFv sequence"
EVQLQQSGPELVKPGASMKISCKASGYSFTGYTMNWVKQSHGKNLEWIGLINPYNGGTIYNQKFKGKATLTVDKSSSTAYMELLSLTSEDSAVYYCARDYGFVLDYWGQGTTLTVSSGGGGSGGGGSGGGGSGGGGSQIVLTQSPAIMSASPGEKVTITCSASSSVSYLHWFQQKPGTSPKLWVYSTSNLPSGVPARFGGSGSGTSYSLTISRMEAEDAATYYCQQRSIYPPWTFGGGTKLEIK

SEQ ID NO: 417 - protein, 244 aa, Artificial Sequence
  source: /note="Description of Artificial Sequence: Synthetic scFv sequence"
EVQLQQSGPELVKPGASMKISCKASGYSFTGYTMNWVKQSHGKNLEWIGLINPYNGGTIYNQKFKGKATLTVDKSSSTAYMELLSLTSEDSAVYYCARDYGFVLDYWGQGTTLTVSSGGGGSGGGGSGGGGSGGGGSQIVLTQSPSIMSVSPGEKVTITCSASSSVSYMHWFQQKPGTSPKLGIYSTSNLASGVPARFSGRGSGTSYSLTISRVAAEDAATYYCQQRSNYPPWTFGGGTKLEIK

SEQ ID NO: 418 - protein, 239 aa, Artificial Sequence
  source: /note="Description of Artificial Sequence: Synthetic scFv sequence"
EVQLQQSGPELVKPGASMKISCKASGYSFTGYTMNWVKQSHGKNLEWIGLINPYNGGTIYNQKFKGKATLTVDKSSSTAYMELLSLTSEDSAVYYCARDYGFVLDYWGQGTTLTVSSGGGGSGGGGSGGGGSQIVLTQSPSIMSVSPGEKVTITCSASSSVSYMHWFQQKPGTSPKLCIYSTSNLASGVPARFSGRGSGTSYSLTISRVAAEDAATYYCQQRSNYPPWTFGGGTKLEIK

SEQ ID NO: 419 - protein, 241 aa, Artificial Sequence
  source: /note="Description of Artificial Sequence: Synthetic scFv sequence"
DIQMTQSPASLSASVGETVTITCRASENIDSYLAWYQQKQGKSPQLLVYASTLLVDGVPSRFSGSRSGTQFSLKINSLQSEDVARYYCQHYYSIPYTFGSGTKLEIKGGGGSGGGGSGGGGSEVKLVESGGGLVKPGGSLKLSCAASGFTFNSYTMSWVRQTPAKRLEWVVTISSGGGRTYYPDSVKGRFTISRDNARNTLYLQMSSLRSEDTAMYYCIRGDYRYDGFAYWGQGTVVTVST

SEQ ID NO: 420 - protein, 241 aa, Artificial Sequence
  source: /note="Description of Artificial Sequence: Synthetic scFv sequence"
EVKLVESGGGLVKPGGSLKLSCAASGFTFNSYTMSWVRQTPAKRLEWVVTISSGGGRTYYPDSVKGRFTISRDNARNTLYLQMSSLRSEDTAMYYCIRGDYRYDGFAYWGQGTVVTVSTGGGGSGGGGSGGGGSDIQMTQSPASLSASVGETVTITCRASENIDSYLAWYQQKQGKSPQLLVYASTLLVDGVPSRFSGSRSGTQFSLKINSLQSEDVARYYCQHYYSIPYTFGSGTKLEIK

SEQ ID NO: 421 - protein, 247 aa, Artificial Sequence
  source: /note="Description of Artificial Sequence: Synthetic scFv sequence"
EVQLQQSGAEVKKPGSSVKVSCKASGGTFSSYAISWVRQAPGQGLEWMGGIIPIFGTANYAQKFQGRVTITADESTSTAYMELSSLRSEDTAVYYCARDLEMATIMGGYWGQGTLVTVSSGGGGSGGGGSGGGGSQSALTQPASVSGSPGQSITISCTGTSSDVGGYNYVSWYQQHPGKAPKLMIYDVSNRPSGVSNRFSGSKSGNTASLTISGLQAEDEADYYCSSYTSSSTLDVVFGGGTKLTVL

SEQ ID NO: 422 - protein, 245 aa, Artificial Sequence
  source: /note="Description of Artificial Sequence: Synthetic scFv sequence"
EVQLQQSGPGLVRPSETLSLTCTVSGGPVRSGSHYWNWIRQPPGRGLEWIGYIYYSGSTNYNPSLENRVTISIDTSNNHFSLKLSSVTAADTALYFCARGTATFDWNFPFDSWGQGTLVTVSSGGGGSGGGGSGSGGSDIQMTQSPSSLSASIGDRVTITCRASQSISSYLNWYQQKPGKAPKLLIYAASSLQSGVPSRFSGSGSGTDFTLTISSLQPEDFATYYCQQSYSTPWTFGQGTKLEIK

SEQ ID NO: 423 - protein, 255 aa, Artificial Sequence
  source: /note="Description of Artificial Sequence: Synthetic scFv sequence"
EVQLVESGGGLVKPGGSLRLSCAASGFTFSSYSMNWVRQAPGKGLEWVSSISSSSSYIYYADSVKGRFTISRDNAKNSLYLQMNSLRAEDTAVYYCARDPSSSGSYYMEDSYYYGMDVWGQGTTVTVSSGGGGSGGGGSGGGGSNFMLTQPHSVSESFGKTVTISCTGSSGSIASNYVQWYQQRPGSAPTTVIYEDNQRPSGVPDRFSGSIDSSSNSASLTISGLKTEDEADYYCQSYDSSNQVVFGGGTKLTVL

SEQ ID NO: 424 - protein, 255 aa, Artificial Sequence
  source: /note="Description of Artificial Sequence: Synthetic scFv sequence"
EVQLVESGGGLVKPGGSLRLSCAASGFTFSSYSMNWVRQAPGKGLEWVSSISSSSSYIYYADSVKGRFTISRDNAKNSLYLQMNSLRAEDTAVYYCARDPSSSGSYYMEDSYYYGMDVWGQGTTVTVSSGGGGSGGGGSGGGGSNFMLTQPHSVSESPGKTVTISCTGSSGSIASNYVQWYQQRPGSAPTTVIYEDNQRPSGVPDRFSGSIDSSSNSASLTISGLKTEDEADYYCQSYDSSNQVVFGGGTKLTVL

SEQ ID NO: 425 - protein, 245 aa, Artificial Sequence
  source: /note="Description of Artificial Sequence: Synthetic scFv sequence"
EVQLVESGGGLVQPGGSLRLSCAASGFTFSSYEMNWVRQAPGKGLEWVSYISSSGSTIYYADSVKGRFTISRDNAKNSLYLQMNSLRAEDTAVYYCARDPYSSSWHDAFDIWGQGTMVTVSSGGGGSGGGGSGGGGSEIVLTQSPGTLSLSPGERATLSCRASQSVSSSYLAWYQQKPGQAPRLLIYGASSRATGIPDRFSGSGSGTDFTLTISRLEPEDFAVYYCQQYGSSPLTFGGGTKVDIK

SEQ ID NO: 426 - protein, 245 aa, Artificial Sequence
  source: /note="Description of Artificial Sequence: Synthetic scFv sequence"
EVQLVESGGGVVQPGGSLRLSCAASGFTFDDYAMHWVRQAPGKGLEWVSLISGDGGSTYYADSVKGRFTISRDNSKNTLYLQMNSLRVEDTAVYYCARVFDSYYMDVWGKGTTVTVSSGGGGSGGGGSGSGGSEIVLTQSPLSLPVTPGQPASISCRSSQSLVYTDGNTYLNWFQQRPGQSPRRLIYKVSNRDSGVPDRFSGSGSDTDFTLKISRVEAEDVGIYYCMQGTHWSFTFGQGTRLEIK

SEQ ID NO: 427 - protein, 245 aa, Artificial Sequence
  source: /note="Description of Artificial Sequence: Synthetic scFv sequence"
EVQLVESGGGVVQPGGSLRLSCAASGFTFDDYAMHWVRQAPGKGLEWVSLISGDGGSTYYADSVKGRFTISRDNSKNTLYLQMNSLRVEDTAVYYCARVFDSYYMDVWGKGTTVTVSSGGGGSGGGGSGSGGSEIVLTQSPLSLPVTPGQPASISCRSSQSLVYTDGNTYLNWFQQRPGQSPRRLIYKVSNRDSGVPDRFSGSGSDTDFTLKISRVEAEEVGIYYCMQGTHWSFTFGQGTRLEIK

SEQ ID NO: 428 - protein, 246 aa, Artificial Sequence
  source: /note="Description of Artificial Sequence: Synthetic scFv sequence"
EVQLVQSGGGVVRSGRSLRLSCAASGFTFNSYGLHWVRQAPGKGLEWVALIEYDGSNKYYGDSVKGRFTISRDKSKSTLYLQMDNLRAEDTAVYYCAREGNEDLAFDIWGQGTLVTVSSGGGGSGGGGSGGGGSGGGGSEIVLTQSPSSLSASVGDRVTITCQASQFIKKNLNWYQHKPGKAPKLLIYDASSLQTGVPSRFSGNRSGTTFSFTISSLQPEDVATYYCQQHDNLPLTFGGGTKVEIK

SEQ ID NO: 429 - protein, 239 aa, Artificial Sequence
  source: /note="Description of Artificial Sequence: Synthetic scFv sequence"
QVNLRESGGGLVQPGGSLRLSCAASGFTFSSYEMNWVRQAPGKGLEWVSYISSSGSTIYYADSVKGRFTISRDNAKNSLYLQMNSLRAEDTAVYYCAREALGSSWEWGQGTTVTVSSGGGGSGGGGSGGGGSDIQMTQSPSSLSASVGDRVTITCQASQDISNYLNWYQQKPGKAPKLLIYDASNLETGVPSRFSGSGSGTDFTFTISSLQPEDIATYYCQQYDNLPLTFGGGTKLEIK

SEQ ID NO: 430 - protein, 249 aa, Artificial Sequence
  source: /note="Description of Artificial Sequence: Synthetic scFv sequence"
QVQLQESGAGLLKPSETLSLTCAVYGGSFSGYYWSWIRQPPGKGLEWVGEINHSGSTNYNPSLKSRVTISVDTSKNQFSLKLSSVTAADTAVYYCARGSGLVVYAIRVGSGWFDYWGQGTLVTVSSGGGGSGGGDSGGGGSDIQMTQSPSSLSASVGDRVTITCRASQSISSYLNWYQQKPGKAPKLLMYAASSLQSGVPSRFSGSGSGTDFTLTISSLQPEDFATYYCQQSYSTPPWTFGQGTKVDIK

SEQ ID NO: 431 - protein, 247 aa, Artificial Sequence
  source: /note="Description of Artificial Sequence: Synthetic scFv sequence"
QVQLQESGPGLVKPSETLSLTCTVSGGSISSSSYYWGWIRQPPGKGLEWIGSIYYSGSTYYNPSLKSRVSISVDTSKNQFSLKLKYVTAADTAVYYCATPGTYYDFLSGYYPFYWGQGTLVTVSSGGGGSGGGGSGGGGSDIVMTQSPSSLSASVGDRVTITCRASQGISSYLAWYQQKPGKAPKLLIYAASTLQSGVPSRFSGSGSGTDFTLTISSLQPEDFATYYCQQLNSYPYTFGQGTKLEIK

SEQ ID NO: 432 - protein, 255 aa, Artificial Sequence
  source: /note="Description of Artificial Sequence: Synthetic scFv sequence"
QVQLVESGGGLVQPGGSLRLSCAASGFNVSSNYMTWVRQAPGKGLEWVSVIYSGGATYYGDSVKGRFTVSRDNSKNTVYLQMNRLTAEDTAVYYCARDRLYCGNNCYLYYYYGMDVWGQGTLVTVSSGGGGSGGGGSGGGGSGGGGSDIQVTQSPSSLSASVGDRVTITCRASQSISSYLNWYQQKPGKAPKLLIYAASSLQSGVPSRFSGSGSGTDFTLTISSLQPEDFATYYCQQSYSTPPLTFGQGTKVEIK

SEQ ID NO: 433 - protein, 239 aa, Artificial Sequence
  source: /note="Description of Artificial Sequence: Synthetic scFv sequence"
QVQLVESGGGLVQPGGSLRLSCAASGFTFSSYWMSWVRQAPGKGLEWVANINEDGSAKFYVDSVKGRFTISRDNAKNSLYLQMNSLRAEDTAVYFCARDLRSGRYWGQGTLVTVSSGGGGSGGGGSGGGGSEIVLTQSPGTLSLSPGGRATLSCRASQSISGSFLAWYQQKPGQAPRLLIYGASSRATGIPDRFSGSGSGTDFTLTISRLEPEDFAVYYCQQYGSSPPTFGLGTKLEIK

SEQ ID NO: 434 - protein, 246 aa, Artificial Sequence
  source: /note="Description of Artificial Sequence: Synthetic scFv sequence"
QVQLVQSGAEVKEPGASVKVSCKAPANTFSDHVMHWVRQAPGQRFEWMGYIHAANGGTHYSQKFQDRVTITRDTSANTVYMDLSSLRSEDTAVYYCARGGYNSDAFDIWGQGTMVTVSSGGGGSGGGGSGGGGSGGGGSDIVMTQSPSSVSASVGDRVTITCRASQDISSWLAWYQQKPGKAPKLLIYAASSLQSGVPSRFNGSGSGTDFTLTISSLQPEDFATYYCQQSYSTPLTFGGGTKVEIK

SEQ ID NO: 435 - protein, 247 aa, Artificial Sequence
  source: /note="Description of Artificial Sequence: Synthetic scFv sequence"
QVQLVQSGAEVKKSGASVKVSCKASGYPFTGYYIQWVRQAPGQGLEWMGWIDPNSGNTGYAQKFQGRVTMTRNTSISTAYMELSSLRSEDTAVYYCASDSYGYYYGMDVWGQGTLVTVSSGGGGSGGGGSGGGGSGGGGSDIQMTQSPSSLSASVGDRVTFTCRASQGISSALAWYQQKPGKPPKLLIYDASSLESGVPSRFSGSGSGTDFTLTISSLQFEDFATYYCQQFNNYPLTFGGGTKVEIK

SEQ ID NO: 436 - protein, 247 aa, Artificial Sequence
  source: /note="Description of Artificial Sequence: Synthetic scFv sequence"
QVQLVQSGAEVKKSGASVKVSCKASGYPFTGYYIQWVRQAPGQGLEWMGWIDPNSGNTGYAQKFQGRVTMTRNTSISTAYMELSSLRSEDTAVYYCASDSYGYYYGMDVWGQGTLVTVSSGGGGSGGGGSGGGGSGGGGSDIQMTQSPSSLSASVGDRVTFTCRASQGISSALAWYQQKPGKPPKLLIYDASSLESGVPSRFSGSGSGTDFTLTISSLQPEDFATYYCQQFNNYPLTFGGGTKVEIK

SEQ ID NO: 437 - protein, 248 aa, Artificial Sequence
  source: /note="Description of Artificial Sequence: Synthetic scFv sequence"
QVQLVQSGGGLVQPGGSLRLSCAASGFTFSSYSMNWVRQAPGKGLEWVSYISSSSSTIYYADSVKGRFTISRDNAKNSLYLQMNSLRAEDTAVYYCARDLSVRAIDAFDIWGQGTMVTVSSGGGGSGGGGSGGGGSGGGGSDIVLTQSPSSLSASVGDRVTITCQASQDISNYLNWYQQKPGKAPKLLIYDASNLETGVPSRFSGSGSGTDFTFTISSLQPEDFATYYCQQAYSTPFTFGPGTKVEIK

SEQ ID NO: 438 - protein, 253 aa, Artificial Sequence
  source: /note="Description of Artificial Sequence: Synthetic scFv sequence"
EVQLVESGGGLVQPGRSLRLSCAASGFTFDDYDMHWVRQAPGKGLEWVSSISWSGGTIGYADSVKGRFTVSRDNAKNSLYLQMNSVRAEDTALYYCAKDRGAVAALPDYQYGMDVWGRGTLVTVSSGGGGSGGGGSGGGGSAQSALTQPASVSGSPGQSITISCTGTSSDIGSYNLVSWYQQHPGKAPKLMIYEDYKRASGVSNHFSGSKSGNTASLTISGLQAEDEADYYCSSYAGSSAWVFGGGTKVTVLG

SEQ ID NO: 439 - protein, 248 aa, Artificial Sequence
  source: /note="Description of Artificial Sequence: Synthetic scFv sequence"
EVQLVESGPGLVKPSGTLSLTCAVSGGSISTSDWWSWVRRPPGKGLEWIGEIYHSGSTNYHPSLKSRVTISLDKSKNQFSLKLSSVTAADTAVYYCAREGGHSGSYPLDYWGRGTLVTVSSGGGGSGGGGSGGGGSAQSVVTQPPSVSAAPGQKVTISCSGNFSNIEYNYVSWYQHLPGTAPKLLIFDNNQRPSWIPDRFSGSKSGTSATLGITGLQTGDEADYYCGTWDSSLNAGVFGGGTKVTVLG

SEQ ID NO: 440 - protein, 255 aa, Artificial Sequence
  source: /note="Description of Artificial Sequence: Synthetic scFv sequence"
EVQLVQSGAEMKKPGSSVKVSCKASGGTFSSYAVNWVRQAPGQGLEWMGGIIPIFDTSNYAQKFQGRLTMTADDSTNTAYMELRSLRSEDTAVYYCARGAPRGTVMAFSSYYFDLWGQGTLVTVSSGGGGSGGGGSGGGGSALNFMLTQPHSVSESPGKTVIISCAGSGGNIATNYVQWYQHRPGSAPITVIYEDNQRPSGVPDRFSGSVDSSSNSASLTISGLQTEDEADYYCHSYDNTDQGVFGTGTKVTVLG

SEQ ID NO: 441 - protein, 257 aa, Artificial Sequence
  source: /note="Description of Artificial Sequence: Synthetic scFv sequence"
EVQLVQSGAEVKKPGASVKVSCKASGYSFPSSGLSWVRQAPGQGPEWMGWIGIYNGNTDYAQKFQGRVTMTTDKSTSTAYMELRSLRSDDTAVYYCARDSVGSISVAGTMQYYYFAMDVWGQGTLVTVSSGGGGSGGGGSGGGGSAQSVLTQPPSASGSPGQSVTISCAGTRYDIGTYNYVSWYQQHPAKGPKLIIYAVSERPSGVPNRFSGSKSGNTASLTVSGLRAEDEAHYYCSSYAGNNNVIFGGGTKVTVLG

SEQ ID NO: 442 - protein, 248 aa, Artificial Sequence
  source: /note="Description of Artificial Sequence: Synthetic scFv sequence"
EVQLVQSGAEVKKPGASVKVSCKVSGYSLSELSMHWVRQAPGKGLEWMGGFDPQNGYTIYAQEFQGRITMTEDTSTDTVYMELGSLRSEDTAVYFCAAIEITGVNWYFDLWGKGTLVTVSSGGGGSGGGGSGGGGSALSSELTQDPDVSVALGQTVRITCQGDSLKKFYPGWYQQKPGQAPLLVLYGENIRPSRIPDRFSGSSSGNTATLTITGAQAEDEAVYYCNSREASVHHVRVFGGGTKLTVLG

SEQ ID NO: 443 - protein, 250 aa, Artificial Sequence
  source: /note="Description of Artificial Sequence: Synthetic scFv sequence"
EVQLVQSGAEVKKPGATLKVSCKVSAYTFTDYSMHWVQQAPGKGLKWMGLIDLEDGNTIYAEEFQDRVTITADTSTDTAYMDLSSLRSEDTAVFYCAISPLRGLTADVFDVWGQGTLVTVSSGGGGSGGGGSGGGGSAQSALTQPASASGSPGQSITISCTGTSSDIGRYDFVSWYQRQPGKAPKLMIYDVINRPSGVSSRFSGSKSGNTASLTISGLQAEDEADYYCSSYAGSTTLYVFGTGTKLTVLG

SEQ ID NO: 444 - protein, 246 aa, Artificial Sequence
  source: /note="Description of Artificial Sequence: Synthetic scFv sequence"
EVQLVQSGAEVKKPGSSVKVSCKASGGSFSNYDFSWVRQAPGQGLEWMGEIINAFGSSRYAQKFQDRVTITADESASTAYMELRGLTSEDTATYYCARAERWELNMAFDMWGRGTLVTVSSGGGGSGGGGSGGGGSAQSVLTQPPSVSVAPGQTARITCGGDNIGRKNVHWYQQRPGLAPVLVVYDDTDRPSGIPERFSGSNSGDTATLTITWVEAGDEADYYCQLWDSDTYDVLFGGGTKLTVLG

SEQ ID NO: 445 - protein, 251 aa, Artificial Sequence
  source: /note="Description of Artificial Sequence: Synthetic scFv sequence"
EVQLVQSGAEVKKPGSSVKVSCKASGGTFKTYAINWVRQAPGQGLEWMGGIIPVLGTANYVQKFQGRVTITADESTTTAYMELRGLRSEDTAVYYCARGEGSGWYDHYYGLDVWGQGTLVTVSSGGGGSGGGGSGGGGSAQSVLTQPPSASGTPGQRVTISCSGSSSNIGSNTVNWYRQLPGTAPKLLIFGDDQRPSGVPDRFSGSRSGTSVSLAISGLQSEDEADYYCAAWDDSLNGGVFGGGTKLTVLG

SEQ ID NO: 446 - protein, 247 aa, Artificial Sequence
  source: /note="Description of Artificial Sequence: Synthetic scFv sequence"
EVQLVQSGAEVKKPGSSVKVSCKSSGGPFSSYGISWVRQAPGQGLEWMGGISPIFGTANYAQKFQGRVTITADESTETAYMELSSLRSEDTAVYYCARDESPVGFYALDIWGRGTTVTVSSGGGGSGGGGSGGGGSALSYELTQPPSVSVAPGQTARINCGGDKIGSRSVHWYQQKPGQAPVMVVYDDSDRPSGIPERFSGSNSGNTATLTISSVEAGDEADYYCQVWDGSTDPWVFGGGTKVTVLG

SEQ ID NO: 447 - protein, 249 aa, Artificial Sequence
  source: /note="Description of Artificial Sequence: Synthetic scFv sequence"
EVQLVQSGAEVKKPGSSVKVSCQASGGTFTSHAMYWVRQAPGQGLEWMGGIIPIFGRTNYAQKFQGRVTFTADMSTSTAYMEMTSLRSDDTAVYYCARGDNWNDLYPIDYWGRGTLVTVSSGGGGSGGGGSGGGGSALNFMLTQPHSVSESPGKTVTISCTRSSGSIATTYVQWFQQRPGSSPTTVIYDDDQRPSGVPDRFSGSIDSSSNSASLTISGLMPEDEADYYCQSYDNTDLVFGGGTQLTVLS

SEQ ID NO: 448 - protein, 245 aa, Artificial Sequence
  source: /note="Description of Artificial Sequence: Synthetic scFv sequence"
EVQLVQSGAEVRKPGSSMKVSCKASGDTFRNFAFSWVRQAPGQGLEWMGGVIPLVGPPKYAQKFQGRLTITADESTSTSYMDLTSLTLEDTAVYFCARGGVYAPFDKWGQGTLVTVSSGGGGSGGGGSGGGGSAQSVVTQPPSVSEAPRQRVTISCSGSSSNIGNNAVNWYQQLPGKAPKLLIYYNDLLPSGVSDRFSGSKSGTSASLAISGLQSEDEADYYCAAWDDSLNGWVFGGGTKVTVLG

SEQ ID NO: 449 - protein, 240 aa, Artificial Sequence
  source: /note="Description of Artificial Sequence: Synthetic scFv sequence"
GVQLVESGGGLVKPGGSLRLSCAASGFTFSSYTMNWVRQAPGKGLEWVSYISSSGSATYYADSVKGRFTISRDNANNSLYLQMNSLRAEDTAVYYCARGYRYGMDVWGQGTLVTVSSGGGGSGGGGSGGGGSGIVMTQSPSTLSASVGDRVTITCRASQGISSWLAWYQQKPGRAPKVLIYKASTLESGVPSRFSGSGSGTDFTLTISSLQPEDFATYYCQQSYSTPWTFGQGTKLEIKR

SEQ ID NO: 450 - protein, 242 aa, Artificial Sequence
  source: /note="Description of Artificial Sequence: Synthetic scFv sequence"
KVQLLESGGGLVQPGGSLRLSCAASGFTFSSYAMSWVRQAPGKGLEWVSAISGSGGSTYYADSVKGRFTISRDNSKNTLYLQMNSLRAEDTAVYYCAKDDVRNAFDIWGRGTTVTVSSGGGGSGGGGSGGGGSAQSVLTQPPSVSVSPGQTTSITCSRDKLGEQYVYWYQQRPGQSPILLLYQDSRRPSWIPERFSGSNSGDTATLTISGTQALDEADYYCQAWDNSSYVAFGGGTKVTVLG

SEQ ID NO: 451 - protein, 240 aa, Artificial Sequence
  source: /note="Description of Artificial Sequence: Synthetic scFv sequence"
QLQLQESGPGLVKPSGTLSLTCAVSGDSVSSYYWWSWVRQPPGKGLEWIGEIFRDGSSNYNRSLKSRVTISPDKPKNQFSLRLSSVTAADTAIYYCARHIRGYDAFDIWGRGTLVTVSSGGGGSGGGGSGGGGSAQSVLTQPPSVSGAPGQRVTISCTGSSSNIGAGYDVHWYQQFPGRAPKLLIYGNTNRPSGVPDRFSGSKSDISASLAITGLQAEDEADYYCQSYDSNLTGVFGGGT

SEQ ID NO: 452 - protein, 250 aa, Artificial Sequence
  source: /note="Description of Artificial Sequence: Synthetic scFv sequence"
QLQLQESGPGLVKPSGTLSLTCAVSGGSISSTNWWSWVRQPPGKGLEWIGEIYHSGSTNYNPSLKSRVTISVDKSKNHFSLNLSSVTAADTAVYYCARDSMGSTGWHYGMDLWGKGTLVTVSSGGGGSGGGGSGGGGSAQSALTQPASVSGSPGQSIAISCTGTSSDVGGYNYVSWYQQHPGKAPKLMIYAVTNRPSGVSDRFSGSKSGNTASLTISGLQADDEADYYCSSYTSSSSLVFGGGTKLTVLG

SEQ ID NO: 453 - protein, 250 aa, Artificial Sequence
  source: /note="Description of Artificial Sequence: Synthetic scFv sequence"
QLQLQESGPGLVKPSGTLSLTCAVSGGSISSTNWWSWVRQPPGKGLEWIGEIYHSGSTNYNPSLKSRVTISVDKSKNHFSLNLSSVTAADTAVYYCARDSMGSTGWHYGMDLWGRGTLVTVSSGGGGSGGGGSGGGGSAQSALTQPPSASGSPGQSVTISCSGSSSDIGDYNHVSWYQQHPGKAPKLMIYDVNKWPSGVPDRFSGSKSGNTASLTVSGLQAEDEADYYCSSYSGIYNLVFGGGTKVTVLG

SEQ ID NO: 454 - protein, 251 aa, Artificial Sequence
  source: /note="Description of Artificial Sequence: Synthetic scFv sequence"
QLQLQESGPGLVKPSGTLSLTCAVSGGSISTSDWWSWVRRPPGKGLEWIGEIYHSGSTNYHPSLKSRVTISLDKSKNQFSLKLSSVTAADTAVYYCAREGGHSGSYPLDYWGKGTLVTVSSGGGGSGGGGSGGGGSALNFMLTQPHSVSESPGKTVTISCTRSSGSIASNYVQWYQQRPGSSPTTVIYEDNQRPSGVPDRFSGSIDSSSNSASLTISGLKTEDEADYYCQSYDSSNPYVVFGGGTKLTVLG

SEQ ID NO: 455 - protein, 248 aa, Artificial Sequence
  source: /note="Description of Artificial Sequence: Synthetic scFv sequence"
QLQLQESGPGLVKPSGTLSLTCAVSGGSISTSDWWSWVRRPPGKGLEWIGEIYHSGSTNYHPSLKSRVTISLDKSKNQFSLKLSSVTAADTAVYYCAREGGHSGSYPLDYWGKGTLVTVSSGGGGSGGGGSGGGGSAQAVLTQPSSVSAAPGQKVTISCSGSSSNIGNNYVSWYQQLPGTAPKLLIYDNNKRPSGIPDRFSGSRSGTSATLGITGLQTGDEADYYCGTWDSSLSAVVFGTGTKLTVLG

SEQ ID NO: 456 - protein, 251 aa, Artificial Sequence
  source: /note="Description of Artificial Sequence: Synthetic scFv sequence"
QLQLQESGPGLVKPSGTLSLTCAVSGGSISTSDWWSWVRRPPGKGLEWIGEIYHSGSTNYHPSLKSRVTISLDKSKNQFSLKLSSVTAADTAVYYCAREGGHSGSYPLDYWGQGTLVTVSSGGGGSGGGGSGGGGSALNFMLTQPHSVSESPGKTVTISCTGSSGSIASNYVQWYQQRPGSAPTTLIYEDDQRPSGVPDRFSGSVDSSSNSASLTISGLKTEDEADYYCQSYDRSNQAVVFGGGTKLTVLG

SEQ ID NO: 457 - protein, 251 aa, Artificial Sequence
  source: /note="Description of Artificial Sequence: Synthetic scFv sequence"
QLQLQESGPGLVKPSGTLSLTCAVSGGSISTSDWWSWVRRPPGKGLEWIGEIYHSGSTNYHPSLKSRVTISLDKSKNQFSLKLSSVTAADTAVYYCAREGGHSGSYPLDYWGQGTLVTVSSGGGGSGGGGSGGGGSALNFMLTQPHSVSESPGKTVTISCTRSSGSIDNNYVQWYQQRPGSSPTTVIFEDNQRPSGVPDRFSGSIDSSSNSASLTISGLKTEDEADYYCQSYDSHNQGVVFGGGTKLTVLG

SEQ ID NO: 458 - protein, 249 aa, Artificial Sequence
  source: /note="Description of Artificial Sequence: Synthetic scFv sequence"
QLQLQESGPGLVKPSGTLSLTCAVSGGSISTSDWWSWVRRPPGKGLEWIGEIYHSGSTNYHPSLKSRVTISLDKSKNQFSLKLSSVTAADTAVYYCAREGGHSGSYPLDYWGQGTLVTVSSGGGGSGGGGSGGGGSALNFMLTQPHSVSESPGKTVTVSCTGSGGNIASNYVQWYQQRPDSAPTLVIFEDTQRPSGVPARFSGSIDSSSNSASLIISSLRTEDEADYYCQSSDSNRVVFGGGTKVTVLG

SEQ ID NO: 459 - protein, 248 aa, Artificial Sequence
  source: /note="Description of Artificial Sequence: Synthetic scFv sequence"
QLQLQESGPGLVKPSGTLSLTCAVSGGSISTSDWWSWVRRPPGKGLEWIGEIYHSGSTNYHPSLKSRVTISLDKSKNQFSLKLSSVTAADTAVYYCAREGGHSGSYPLDYWGQGTLVTVSSGGGGSGGGGSGGGGSAQSVVTQPPSVSAAPGQKVTISCSGSSSNIGNNYVSWYKQLPGTAPKLLIYDNNKRPSGIPDRFSGSKSGTSATLGITGLQTGDEADYYCGTWDSSLSGVVFGGGTKLTVLG

SEQ ID NO: 460 - protein, 250 aa, Artificial Sequence
  source: /note="Description of Artificial Sequence: Synthetic scFv sequence"
QLQLQESGPGLVKPSGTLSLTCAVSGGSISTSDWWSWVRRPPGKGLEWIGEIYHSGSTNYHPSLKSRVTISLDKSKNQFSLKLSSVTAADTAVYYCAREGGHSGSYPLDYWGRGTLVTVSSGGGGSGGGGSGGGGSALNFMLTQPHSVSESPGKTVTISCARSSGSIASNYVQWYQQRPGSSPTTLIYEDRQRPSGVPDRFSGSIDSSSNSASLTISGLKTEDEADYYCQSYDSSDHVVFGGGTKLTVLG

SEQ ID NO: 461 - protein, 251 aa, Artificial Sequence
  source: /note="Description of Artificial Sequence: Synthetic scFv sequence"
QLQLQESGPGLVKPSGTLSLTCAVSGGSISTSDWWSWVRRPPGKGLEWIGEIYHSGSTNYHPSLKSRVTISLDKSKNQFSLKLSSVTAADTAVYYCAREGGHSGSYPLDYWGRGTLVTVSSGGGGSGGGGSGGGGSALNFMLTQPHSVSESPGKTVTISCTRSSGSIASNYVQWYQQRPGSSPTTLIYDDNQRPSGVPDRFSGSIDSSSNSASLTISGLKTEDEADYYCQSYDSSNLGVVFGGGTKLTVLG

SEQ ID NO: 462 - protein, 248 aa, Artificial Sequence
  source: /note="Description of Artificial Sequence: Synthetic scFv sequence"
QLQLQESGPGLVKPSGTLSLTCAVSGGSISTSDWWSWVRRPPGKGLEWIGEIYHSGSTNYHPSLKSRVTISLDKSKNQFSLKLSSVTAADTAVYYCAREGGHSGSYPLDYWGRGTLVTVSSGGGGSGGGGSGGGGSAQSVLTQPPSVSAAPGQKVTISCSGSSSNIGNSYVSWYKQLPGTAPKVLIYDNQKRSSGIPDRFSASKSGTSATLGITGLRTEDEADYYCGTWDTSLSAVVFGGGTKLTVLG

SEQ ID NO: 463 - protein, 252 aa, Artificial Sequence
  source: /note="Description of Artificial Sequence: Synthetic scFv sequence"
QVQLQESGAEVKKPGSSVKVSCKASGGTFSSSAISWVRQAPGQGLEWMGGIIPVFGTANYAQKFQDRVTITADESTSTAYLELSRLTSEDTAVYYCASRGEYDYGDYDVYYYYMEVWGQGTLVTVSSGGGGSGGGGSGGGGSAQSVLTQPPSVSVAPGQTARLTCGANNIGSTSVHWYQQKPGQAPVLVIYDDTDRPSGIPERFSGSNSGNTATLTIRRVEAGDEADYYCQVWDTNSDHVIFGGGTKLTVLG

SEQ ID NO: 464 - protein, 243 aa, Artificial Sequence
  source: /note="Description of Artificial Sequence: Synthetic scFv sequence"
QVQLQESGGGLLQPGGSLRLSCAASRFTFSNYAMSWVRQAPGKGLEWVSAISGSGASTYYADSVKGRFTISRDNSKNTLYLQMNSLRAEDTAVYYCSNLYGDYDYWGQGTLVTVSSGGGGGSGGGGSGGGGSQSVLTQPASVSGSPGQSITISCTGTSSDVGGYNYVSWYQQHPGKAPKLMIYDVSNRPSGVSNRFSGSKSGNTASLTISGLQAEDEADYYCSSYTSSSTLLFGGGTKLTVLG

SEQ ID NO: 465 - protein, 245 aa, Artificial Sequence
  source: /note="Description of Artificial Sequence: Synthetic scFv sequence"
QVQLQESGGGLVQPGGSLRLSCAASGFTFSNYAMSWVRQAPGKGLEWVSAISGSGGSTYYADSVKGRFTISRDNSKNTLYLQMNSLRAEDTAVYYCAKDRFRAAAYWGQGTLVTVSSGGGGGSGGGGSGGGGSQSVLTQPPSVSAAPGQKVTISCTGSSSNIGAGYDVHWYQQLPGTAPKLLIYGNSNRPSGVPDRFSGSKSGTSASLAISGLQSEDEADYYCAAWDDILNGEIFGGGTKVTVLG

SEQ ID NO: 466 - protein, 245 aa, Artificial Sequence
  source: /note="Description of Artificial Sequence: Synthetic scFv sequence"
QVQLQESGGGLVQPGGSLRLSCAASGFTFSSYAMSWVRQAPGKGLEWVSAISGSGGSTYYADSVKGRFTISRDNSKNTLYLQMNSLRAEDTAVYYCASQHVGEQSRYFDYWGQGTLVTVSSGGGGGSGGGGSGGGGSDIVMTQSPSSLSASIGDRVTITCRASHSISSYVNWYQKKPGKAPNLLIYAASYLPRGVPSRFSGSGLGTDFTLTISNLQPEDFATYYCQESYSTPYSFGQGTKVDIKR

SEQ ID NO: 467 - protein, 255 aa, Artificial Sequence
  source: /note="Description of Artificial Sequence: Synthetic scFv sequence"
QVQLQESGGGVVQPGGSLRLSCAASGFTFSSYSMNWVRQAPGKGLEWVSSISSSSSYIYYADSVKGRFTISRDNAKNSLYLQMNSLRAEDTAVYYCARDLPSDDYGDYDYYYYGMDVWGQGTTVTVSSGGGGGSGGGGSGGGGSQSVLTQPPSASGTPGQRVTLFCSGSSSNIASNSVKWYQQPPQRAPKLLMFSDDQRPSGVPVRFSASKSGTSASLAISGLQSEDEADYYCAAWDDSLNAEVFGGGTKVTVLG

SEQ ID NO: 468 - protein, 241 aa, Artificial Sequence
  source: /note="Description of Artificial Sequence: Synthetic scFv sequence"
QVQLQESGGGVVQPGRSLRLSCAASGFTFSSYGMHWVRQAPGKGLEWVSAIGSSGGSTHDADTVKGRFTISRDNAKNSLYLQMNSLRAEDTAVYYCARDRARGFDYWGQGTLVTVSSGGGGGSGGGGSGGGGSEIVLTQSPSTLSASIGDRVTITCRASQGISSYLAWYQQKPGKAPKLLIYGASSLQSGVPSRFSGRGSGADFTLTISSLQPEDFATYYCQQLISYPLTFGGGTKVEIKR

SEQ ID NO: 469 - protein, 246 aa, Artificial Sequence
  source: /note="Description of Artificial Sequence: Synthetic scFv sequence"
QVQLQESGPGLVKPSATLSLTCAVSGGSISSNHWWSWVRQSPGKGLEWIGEIYTYGGANYNPSLKSRVDISMDKSKNQFSLHLSSVTAADTAVYYCGRHLTGYDCFDIWGQGTLVTVSSGGGGSGGGGSGGGGSAQAVLTQPSSVSGAPGQRVTISCTGSSSNIGAGYDVHWYQQLPGTAPKLLIYGNSNRPSGVPDRFSGSKSGTSASLAITGLQAEDEADYYCQSYDSSLSGVFGTGTQLTVLS

SEQ ID NO: 470 - protein, 241 aa, Artificial Sequence
  source: /note="Description of Artificial Sequence: Synthetic scFv sequence"
QVQLQESGPGLVKPSETLSLTCNVSGGSIRNYFWSWIRQPPGQGLEYIGYIYYSGTTDYNPSLKGRVTISLDTSKTQFSLKLNSVTAADTAFYYCVRGPNKYAFDPWGQGTLVTVSSGGGGSGGGGSGGGGSALSYELTQPPSVSVSPGQTASITCSGDKLGDKFASWYQQKAGQSPVLVIYRDTKRPSGIPERFSGSNSGNTATLTISGTQAMDEADYYCQAWDSSTAVFGTGTKVTVLG

SEQ ID NO: 471 - protein, 250 aa, Artificial Sequence
  source: /note="Description of Artificial Sequence: Synthetic scFv sequence"
QVQLQESGPGLVKPSGTLSLTCAVSGDSISSSNWWTWVRQPPGKGLEWIGEIFHSGTTNYNPSLNNRVTISLDESRNQFSLELSSVTAADTAIYYCARDSGNYDDNRGYDYWGRGTLVTVSSGGGGSGGGGSGGGGSAQSVLTQPPSVSGAPGQRVTISCAGTSSNIGAGFDVHWYQLLPGRAPKLLIYGNNNRPSGVPDRFSGSKSGTSASLAISGLQSEDEGDYYCAAWDDTVGGPVFGGGTKLTVLG

SEQ ID NO: 472 - protein, 247 aa, Artificial Sequence
  source: /note="Description of Artificial Sequence: Synthetic scFv sequence"
QVQLQESGPGLVKPSGTLSLTCAVSGGSISSSNWWSWVRQAPGKGLEWIGEIYYGGSTNYNPSLKSRVTLSVDKSKNQFSLRLISVTAADTAVYYCARSSGLYGDYGNLWGRGTLVTVSSGGGGSGGGGSGGGGSAQSVVTQPPSVSAAPGQKVTISCSGSASNIGDHYISWYQQFPGTAPKLLISDNDQRPSGIPDRFSGSKSGTSATLGITGLQTGDEADYYCGTWDSNLSSWVFGSGTKVTVLG

SEQ ID NO: 473 - protein, 251 aa, Artificial Sequence
  source: /note="Description of Artificial Sequence: Synthetic scFv sequence"
QVQLQESGPGLVKPSGTLSLTCAVSGGSISSTNWWSWVRQPPGKGLEWIGEIYHSGSTNYNPSLKSRVTISVDKSKNHFSLNLSSVTAADTAVYYCARDSMGSTGWHYGMDLWGQGTTVTVSSGGGGSGGGGSGGGGSAQSALTQPASVSGSPGQSITISCTGTSSDVGGYNYVSWYQQHPGKAPKLMIYEVSNRPLGVSNRFSGSKSGNTASLTISGLQAEDEGDYYCSSYTSSTTLIVFGGGTKLTVLG

SEQ ID NO: 474 - protein, 250 aa, Artificial Sequence
  source: /note="Description of Artificial Sequence: Synthetic scFv sequence"
QVQLQESGPGLVKPSGTLSLTCAVSGGSISSTNWWSWVRQPPGKGLEWIGEIYHSGSTNYNPSLKSRVTISVDKSKNHFSLNLSSVTAADTAVYYCARDSMGSTGWHYGMDLWGRGTLVTVSSGGGGSGGGGSGGGGSAQSALTQPAAVSGSPGQSITISCTGSSSDVGGYNYVSWYQQHPGKAPKLLIYDVSDRPSGVSYRFSGSKSGNTASLTISGLQAEDEADYYCSSYTATGTLVFGGGTKLTVLG

SEQ ID NO: 475 - protein, 251 aa, Artificial Sequence
  source: /note="Description of Artificial Sequence: Synthetic scFv sequence"
QVQLQESGPGLVKPSGTLSLTCAVSGGSISTSDWWSWVRRPPGKGLEWIGEIYHSGSTNYHPSLKSRVTISLDKSKNQFSLKLSSVTAADTAVYYCAREGGHSGSYPLDYWGKGTLVTVSSGGGGSGGGGSGGGGSALNFMLTQPHSVSESPGKTVTISCTRSSGSIASNYVQWYQQRPGSSPTTVIYEDNQRPSGVPDRFSGSIDSSSNSASLTISGLKTEDEADYYCQSYDSSNQGVVFGGGTKLTVLG

SEQ ID NO: 476 - protein, 249 aa, Artificial Sequence
  source: /note="Description of Artificial Sequence: Synthetic scFv sequence"
QVQLQESGPGLVKPSGTLSLTCAVSGGSISTSDWWSWVRRPPGKGLEWIGEIYHSGSTNYHPSLKSRVTISLDKSKNQFSLKLSSVTAADTAVYYCAREGGHSGSYPLDYWGQGTLVTVSSGGGGSGGGGSGGGGSALNFMLTQPHSVSESPGKTVTISCTRSSGSIASKYVQWYQQRPGSAPTSVIYEDNQRPSGVPDRFSGSIDSASNSASLTISGLKTEDEADYYCQSDDGSSVVFGGGTKVTVLG

SEQ ID NO: 477 - protein, 251 aa, Artificial Sequence
  source: /note="Description of Artificial Sequence: Synthetic scFv sequence"
QVQLQESGPGLVKPSGTLSLTCAVSGGSISTSDWWSWVRRPPGKGLEWIGEIYHSGSTNYHPSLKSRVTISLDKSKNQFSLKLSSVTAADTAVYYCAREGGHSGSYPLDYWGQGTLVTVSSGGGGSGGGGSGGGGSALNFMLTQPHSVSGSPGRTVTISCTRSSGSIATNYVQWYQQRPGSSPTIVIYEDNQRPSGVPDRFSGSIDTSSNSASLTISGLKTEDEADYYCQSYDSNNLGVVFGGGTQLTVLS

SEQ ID NO: 478 - protein, 248 aa, Artificial Sequence
  source: /note="Description of Artificial Sequence: Synthetic scFv sequence"
QVQLQESGPGLVKPSGTLSLTCAVSGGSISTSDWWSWVRRPPGKGLEWIGEIYHSGSTNYHPSLKSRVTISLDKSKNQFSLKLSSVTAADTAVYYCAREGGHSGSYPLDYWGQGTLVTVSSGGGGSGGGGSGGGGSAQSVLTQPPSVSGTTGQRVILSCSGGNSNIGYNSVNWYQQLPGTAPKLLIYTDDQRPSGVPDRFSGSRSGTSASLAISGLQSEDEADYYCATWDDSLNAGVFGGGTKLTVLG

SEQ ID NO: 479 - protein, 250 aa, Artificial Sequence
  source: /note="Description of Artificial Sequence: Synthetic scFv sequence"
QVQLQESGPGLVKPSGTLSLTCAVSGGSISTSDWWSWVRRPPGKGLEWIGEIYHSGSTNYHPSLKSRVTISLDKSKNQFSLKLSSVTAADTAVYYCAREGGHSGSYPLDYWGRGTLVTVSSGGGGSGGGGSGGGGSALNFMLTQPHSVSESPGKTATISCTGSGGSIARSYVQWYQQRPGRAPSIVIYEDYQRPSGVPDRFSGSIDSSSNSASLTITGLKTDDEADYYCQSSDDNNNVVFGGGTKVTVLG

SEQ ID NO: 480 - protein, 248 aa, Artificial Sequence
  source: /note="Description of Artificial Sequence: Synthetic scFv sequence"
QVQLQESGPGLVKPSGTLSLTCAVSGGSISTSDWWSWVRRPPGKGLEWIGEIYHSGSTNYHPSLKSRVTISLDKSKNQFSLKLSSVTAADTAVYYCAREGGHSGSYPLDYWGRGTLVTVSSGGGGSGGGGSGGGGSAQAVLTQPSSVSAAPGQKVTISCSGSSSNIGNNYVSWYQQLPGTAPKLLIYDNNERPSGIPDRFSGSKSGTSATLGITGLQTGDEADYYCGTWDSSLSTVVFGTGTKVTVLG

SEQ ID NO: 481 - protein, 247 aa, Artificial Sequence
  source: /note="Description of Artificial Sequence: Synthetic scFv sequence"
QVQLQESGPGLVKPSGTLSLTCAVSGGSISTSDWWSWVRRPPGKGLEWIGEIYHSGSTNYHPSLKSRVTISLDKSKNQFSLKLSSVTAADTAVYYCAREGGHSGSYPLDYWGRGTMVTVSSGGGGSGGGGSGGGGSAQSVLTQPPSASGTPGQRVTISCSGSFSNIGGNYVNWYQQLPGTAPKLLIYGNNQRPSGVPDRFSSFKSGTSASLAISGLRSEDEADYYCATWDDSQTVLFGGGTKLTVLG

SEQ ID NO: 482 - protein, 247 aa, Artificial Sequence
  source: /note="Description of Artificial Sequence: Synthetic scFv sequence"
QVQLQESGPGLVRSSGILSLTCSVSGVSVSSNNWWSWVRQTPGKGLEWIGEIYQTGTTNYNPSLKSRVAISLDKSRNQFSLILKSVTAADTAVYYCARTSSAWSNADWGKGTMVTVSSGGGGSGGGGSGGGGSALSSELTQDPSASGSPGQSVSISCTGTSSDVGGYNYVSWYQQHPGKAPKLMISEVTKRPSGVPDRFSGSKSGNTASLTVSGLQAEDEADYYCSSFGANNNYLVFGGGTKLTVLG

SEQ ID NO: 483 - protein, 251 aa, Artificial Sequence
  source: /note="Description of Artificial Sequence: Synthetic scFv sequence"
QVQLQESGPRLVKPSQTLSLTCTVSNDSIISGDYFWSWIRQPPGKGLEWIGNIFYTGSTSYNPSLKSRLTMSLDTSKNQFSLRLSSVTAADTAVYFCARGRQGMNWNSGTYFDSWGRGTLVTVSSGGGGSGGGGSGGGGSALSYVLTQPPSVSVAPGKTANITCGGKNIGNKSVQWYQQKPGQAPVVVMYYDSDRPSGIPERFSGSNAGNTATLTIDRVEAGDEADYYCQVWDKSSDRPVFGGGTKLTVLG

SEQ ID NO: 484 - protein, 244 aa, Artificial Sequence
  source: /note="Description of Artificial Sequence: Synthetic scFv sequence"
QVQLQQSGAEVRKPGASAKVSCKTSGYTFIDYYIHWVRQAPGQGLEWMGWINPVTGASGSSPNFRGRVTLTTDTSGNTAYMELRSLRSDDTAVFYCARRHQQSLDYWGRGTTVTVSSGGGGSGGGGSGGGGSAQSVVTQPPSVSAAPGQKVTISCSGRTSNIGNNYVSWYQQVPGAPPKLLIFDNNKRPSGTPARFSGSKSGTSATLAISGLQTGDEADYYCGTWDTTLRGFVFGPGTKVTVLG

SEQ ID NO: 485 - protein, 249 aa, Artificial Sequence
  source: /note="Description of Artificial Sequence: Synthetic scFv sequence"
QVQLQQSGAEVRKPGASVKISCKTSGYTFMDYYIHWVRQAPGQGLEWMGWSNPVTGTSGSSPKFRGRVTLTTDTSGNTAYLDLRSLRSDDTAVFYCARRHQQSLDYWGQGTLVTVSSGGGGSGGGGSGGGGSAQAVLTQPSSLSASPGASASLTCTLRSDINVGSYSINWYQQKPGSPPQYLLNYRSDSDKQQGSGVPSRFSGSKDASANAGILLISGLQSEDEADYYCMIWYRTAWVFGGGTKVTVLG

SEQ ID NO: 486 - protein, 241 aa, Artificial Sequence
  source: /note="Description of Artificial Sequence: Synthetic scFv sequence"
QVQLVQSGAEVKKPGASVKVSCKASGYTFTDYYMHWVRQAPGEGLEWMGWMNPNSGGTNYAQKFQGRVTMTRDTSISTAYMELSRLRSDDTAVYYCARSHYWDSWSPGTLVTVSSGGGGGSGGGGSGGGGSSALTQPASVSGSPGQSITISCTGTSGDVGGYNYVSWYQQHPGKAPKLMIYDVSNRPSGVSNRFSGSKSGNTASLTISGLQAEDEADYYCTSYAGSRNLVFGGGTKLTVLG

SEQ ID NO: 487 - protein, 245 aa, Artificial Sequence
  source: /note="Description of Artificial Sequence: Synthetic scFv sequence"
QVQLVQSGAEVKKPGASVKVSCKTSGYTFMEYYIHWVRQAPGQGLEWMGWSNPVTGTSGSSPKFRGRVTLTTDTSGNTAYLDLRSLRSDDTAVFYCARRHQQSLDYWGQGTLVTVSSGGGGSGGGGSGGGGSAQSVVTQPPSASGSPGQSVTISCSGYSSSNIGNNAVSWYQQLPGTAPKLLIFDNNKRPSGIPARFSGSQSGTTATLGITGLQTGDEADYFCGTWDSSLSAFVFGSGTKVTVLG

SEQ ID NO: 488 - protein, 250 aa, Artificial Sequence
  source: /note="Description of Artificial Sequence: Synthetic scFv sequence"
QVQLVQSGAEVKKPGESLKISCKGSGYTFTNYWIAWVRQMPGKGLEWMGIIYPDDSDTRYNPSFQGQVTMSADKSIDTAYLQWSSLKASDTAIYYCARPSGWNDNGYFDYWGRGTTVTVSSGGGGSGGGGSGGGGSALNFMLTQPHSVSASPGKTVTLSCTGSSGSIASNYVQWYRQRPGSAPTTVIYDDNQRPSGVPDRFSGSIDSSSNSASLTISGLKTEDEADYYCQSFDNDNHWVFGGGTKLTVLG

SEQ ID NO: 489 - protein, 244 aa, Artificial Sequence
  source: /note="Description of Artificial Sequence: Synthetic scFv sequence"
QVQLVQSGAEVRKPGASVKVSCKTSGYTFIDYYIHWVRQAPGQGLEWMGWVNPVTGTSGSSPNFRGRVTMTTDTSGNTAYMELRSLRSDDTAVFYCARRHQQSLDYWGQGTLVTVSSGGGGSGGGGSGGGGSAQSVLTQPPSVSAPPGQKVTISCSGSSSNIGTNYVSWYQQLPGTAPKLLIYDNHKRPSVIPDRFSGSKSGTSATLGISGLQTGDEADYYCGTWDYSLSTWVFGGGTKLTVLG

SEQ ID NO: 490 - protein, 244 aa, Artificial Sequence
  source: /note="Description of Artificial Sequence: Synthetic scFv sequence"
QVQLVQSGAEVRKPGASVKVSCKTSGYTFIEYYIHWVRQAPGQGLEWMGWSNPVTGTSGSSPKFRGRVTLTTDTSGNTAYLDLRSLRSDDTAVFYCARRHQQSLDYWGRGTTVTVSSGGGGSGGGGSGGGGSAQSVLTQPPSVSAAPGQKVTISCSGTNSNIGNYYVSWYQQLPGTAPKLLIYDNNKRPSGVPDRFSGSKSGTSASLVISGLRSEDEADYYCAAWDGSLTAWVFGGGTKVTVLG

SEQ ID NO: 491 - protein, 244 aa, Artificial Sequence
  source: /note="Description of Artificial Sequence: Synthetic scFv sequence"
QVQLVQSGAEVRKPGASVKVSCKTSGYTFMDYYIHWVRQAPGQGLEWMGWSNPVTGTSGSSPKFRGRVTLTTDTSGNTAYLDLRSLRSDDTAVFYCARRHQQSLDYWGQGTMVTVSSGGGGSGGGGSGGGGSAQSVLTQPPSVSAAPGQKVTISCSGSSSNIGNNYVSWYQQLPGTAPKLLMYENSKRPSGIPDRFSGSKSGTSGTLGITGLQTGDEADYYCGTWDTSLRAWVFGGGTKVTVLG

SEQ ID NO: 492 - protein, 245 aa, Artificial Sequence
  source: /note="Description of Artificial Sequence: Synthetic scFv sequence"
QVQLVQSGAEVRKPGASVRVSCKTSGYTFLEYYIHWVRQAPGQGLEWMAWSNPVTGTSGSSPKFRGRVTLTADTSGNTAYLDLKSLTSDDTAIFYCARRHQQSLDYWGQGTLVTVSSGGGGSGGGGSGGGGSAQSVLTQPPSVSAAPGQTVTISCSGSNSNIGNNHVSWYRQLPETAPKLLIYDNNKRPSGIPDRFSGSKSGTSATLDITGLQTGDEADYYCATWDNSLSAPWVFGGGTKLTVLG

SEQ ID NO: 493 - protein, 246 aa, Artificial Sequence
  source: /note="Description of Artificial Sequence: Synthetic scFv sequence"
QVQLVQSGGGLVQPGGSLRLSCAASGFTFSSYAMSWVRQAPGKGLEWVSAISGSGGSTYYADSVKGRFTISRDNSKNTLYLQMNSLRAEDTAVYYCAKSSSSWYRSYYFDYWGQGTLVTVSSGGGGGSGGGGSGGGGSQSALTQDPAVSVALGQTVRITCRGDSLRNYYASWYQQKPGQAPVLVIYGKNNRPSGIPDRFSGSFSGNTASLTITGAQAEDEADYYCNSRDSSANQMFGGGTKVTVLG

SEQ ID NO: 494 - protein, 253 aa, Artificial Sequence
  source: /note="Description of Artificial Sequence: Synthetic scFv sequence"
QVQLVQSGPEVKKPGASVEVSCKASGYTFTGDYMHWVRQAPGQGPEWMGWINPQTGVTKYAQKFQGRVTMARDTSINTAYMELRGLRSDDTAVYYCVREDHNYDLWSAYNGLDVWGQGTLVTVSSGGGGSGGGGSGGGGSAQSVLTQPPSVSAAPGQKVTISCSGSSSNIGNNHVSWYQQLAGTAPKLLIFDNDKRPSGIPDRFSGSKSGTSATLGITGLQTGDEADYYCGTWDKSPTDIYVFGSGTKLTVLG

SEQ ID NO: 495 - protein, 243 aa, Artificial Sequence
  source: /note="Description of Artificial Sequence: Synthetic scFv sequence"
EVQLVESGGGLVQPGGSLRLSCAASGFDFSRYWMSWVRQAPGKGLEWIGEINPDSSTINYAPSLKDKFIISRDNAKSLYLQMNSLRAEDTAVYYCARPDGNYWYFDVWGQGTLVTVSSGSTSGGGSGGGSGGGGSSDIQMTQSPSSLSASVGDRVTITCKASQDVGIAVAWYQQKPGKVPKLLIYWASTRHTGVPDRFSGSGSGTDFTLTISSLQPEDVATYYCQQYSSYPYTFGQGTKVEIK

SEQ ID NO: 496 - protein, 259 aa, Artificial Sequence
  source: /note="Description of Artificial Sequence: Synthetic scFv sequence"
MEFGLSWLFLVAILKGVQCSRMAQVKLKESGPELKKPGETVKISCKASGYTFTDYSMHWVKKTPGKGLKWLGWINTATGEPTYADDFKGRFAISLETSARTVYLQINNLRNEDTATYFCFSYYDYWGQGTTVTVSSGGGGSGGGGSGGGGLDIKLTQSPSILSVTPGETVSLSCRASQTIYKNLHWYQQKSHRSPRLLIKYGSDSISGIPSRFTGSGSGTDYTLNINSVKPEDEGIYYCLQGYSTPWTFGGGTKLEIKR

SEQ ID NO: 497 - protein, 219 aa, Artificial Sequence
  source: /note="Description of Artificial Sequence: Synthetic scFv sequence"
DIVMTQSPSSLAVSLGERATMSCKSSQSLFNSRTRKNYLAWYQQKPGQSPKLLIYWASARDSGVPARFTGSGSETYFTLTISRVQAEDLAVYYCMQSFNLRTFGQGTKVEIKRTVAAPSVFIFPPSDEQLKSGTASVVCLLNNFYPREAKVQWKVDNALQSGNSQESVTEQDSKDSTYSLSSTLTLSKADYEKHKVYACEVTHQGLSSPVTKSFNRGEC

SEQ ID NO: 498 - protein, 450 aa, Artificial Sequence
  source: /note="Description of Artificial Sequence: Synthetic scFv sequence"
EVNLVESGGGLVQPGRSLRLSCTASGFTFTDNYMSWVRQAPGKGLEWLGFIRNKANGYTTDYAASVRGRFTISRDNSKSILYLQMNALRTEDTAVYYCARDVGSNYFDYWGQGTLVTVSSASTKGPSVFPLAPSSKSTSGGTAALGCLVKDYFPEPVTVSWNSGALTSGVHTFPAVLQSSGLYSLSSVVTVPSSSLGTQTYICNVNHKPSNTKVDKRVEPKSCDKTHTCPPCPAPELLGGPSVFLFPPKPKDTLMISRTPEVTCVVVDVSHEDPEVKFNWYVDGVEVHNAKTKPREEQYNSTYRVVSVLTVLHQDWLNGKEYKCKVSNKALPAPIEKTISKAKGQPREPQVYTLPPSREEMTKNQVSLTCLVKGFYPSDIAVEWESNGQPENNYKTTPPVLDSDGSFFLYSKLTVDKSRWQQGNVFSCSVMHEALHNHYTQKSLSLSPGK

SEQ ID NO: 499 - protein, 450 aa, Artificial Sequence
  source: /note="Description of Artificial Sequence: Synthetic scFv sequence"
EVQLVESGGGLVQPGRSLRLSCTASGFTFTDNYMSWVRQAPGKGLEWLGFIRNKANGYTTEYAASVKGRFTISRDNSKSIAYLQMNSLKTEDTAVYYCARDVGSNYFDYWGQGTLVTVSSASTKGPSVFPLAPSSKSTSGGTAALGCLVKDYFPEPVTVSWNSGALTSGVHTFPAVLQSSGLYSLSSVVTVPSSSLGTQTYICNVNHKPSNTKVDKRVEPKSCDKTHTCPPCPAPELLGGPSVFLFPPKPKDTLMISRTPEVTCVVVDVSHEDPEVKFNWYVDGVEVHNAKTKPREEQYNSTYRVVSVLTVLHQDWLNGKEYKCKVSNKALPAPIEKTISKAKGQPREPQVYTLPPSREEMTKNQVSLTCLVKGFYPSDIAVEWESNGQPENNYKTTPPVLDSDGSFFLYSKLTVDKSRWQQGNVFSCSVMHEALHNHYTQKSLSLSPGK

SEQ ID NO: 500 - protein, 450 aa, Artificial Sequence
  source: /note="Description of Artificial Sequence: Synthetic scFv sequence"
EVQLVESGGGLVQPGRSLRLSCTASGFTFTDNYMSWVRQAPGKGLEWVGFIRNKANGYTTEYAASVKGRFTISRDDSKSIAYLQMNSLKTEDTAVYYCARDVGSNYFDYWGQGTLVTVSSASTKGPSVFPLAPSSKSTSGGTAALGCLVKDYFPEPVTVSWNSGALTSGVHTFPAVLQSSGLYSLSSVVTVPSSSLGTQTYICNVNHKPSNTKVDKRVEPKSCDKTHTCPPCPAPELLGGPSVFLFPPKPKDTLMISRTPEVTCVVVDVSHEDPEVKFNWYVDGVEVHNAKTKPREEQYNSTYRVVSVLTVLHQDWLNGKEYKCKVSNKALPAPIEKTISKAKGQPREPQVYTLPPSREEMTKNQVSLTCLVKGFYPSDIAVEWESNGQPENNYKTTPPVLDSDGSFFLYSKLTVDKSRWQQGNVFSCSVMHEALHNHYTQKSLSLSPGK

SEQ ID NO: 501 - protein, 250 aa, Artificial Sequence
  source: /note="Description of Artificial Sequence: Synthetic scFv sequence"
SYELTQPPSVSGTPGQRVAISCSGSSSNIGTRMVTWYQHVPGTAPKLLIFNNNQRPSGVPDRFSASKSGTSASLAIIGLQSDDEADYYCAAWDDNLKSYVFGTGTKVTVLGSRGGGGSGGGGSDGGGSLEMAQVQLQQWGAGLLKPSETLSLTCAVYGGSFSGYYWSWIRQLPGKGLEWIGEINHSGSTNYNPYLKSRVTISVDTSKRQFSLKLSSVTAADTAVYYCARAPQSWYVGDVWGQGTLVTVSS

SEQ ID NO: 502 - protein, 250 aa, Artificial Sequence
  source: /note="Description of Artificial Sequence: Synthetic scFv sequence"
SYELTQPPSVSGTPGQRVAISCSGSSSNIGTRMVTWYQHVPGTAPKLLIFNNNQRPSGVPDRFSASKSGTSASLAIIGLQSDDEADYYCAAWDDNLKSYVFGTGTKVTVLGSRGGGGSGGGGSGGGGSLEMAQVQLQQWGAGLLKPSETLSLTCAVYGGSFSGYYWSWIRQPPGKGLEWIGEINHSGSTNYNPSLKSRVTISVDTSKNQFSLKLSSVTAADTAVYYCARAPQSWYRGDVWGQGTLVTVSS

SEQ ID NO: 503 - protein, 250 aa, Artificial Sequence
  source: /note="Description of Artificial Sequence: Synthetic scFv sequence"
SYELTQPPSVSGTPGQRVAISCSGSSSNIGTRMVTWYQHVPGTAPKLLIFNNNQRPSGVPDRFSASKSGTSASLAIIGLQSDDEADYYCAAWDDNLKSYVFGTGTKVTVLGSRGGGGSGGGGSGGGGSLEMAQVQLQQWGAGLLKPSETLSLTCAVYGGSFSGYYWSWIRQPPGKGLEWIGEINHSGSTNYNPSLKSRVTISVDTSKNQFSLKLSSVTAADTAVYYCLRAPQSWYVGDVWGQGTLVTVSS

SEQ ID NO: 504 - protein, 250 aa, Artificial Sequence
  source: /note="Description of Artificial Sequence: Synthetic scFv sequence"
SYELTQPPSVSGTPGQRVAISCSGSSSNIGTRMVTWYQHVPGTAPKLLIFNNNQRPSGVPDRFSASKSGTSASLAIIGLQSDDEADYYCAAWDDNLKSYVFGTGTKVTVLGSRGGGGSGGGGSGGGGSLEMAQVQLQQWGAGLLKPSETMSLTCAVYGGSFSGYYWSWIRQPPGKGLEWIGEINHSGSTNYNPSLKSRVTISVDTSKNQFSLKLSSVTAADTAVYYCARAPQSWYRGDVWGQGTLVTVSS

SEQ ID NO: 505 - protein, 250 aa, Artificial Sequence
  source: /note="Description of Artificial Sequence: Synthetic scFv sequence"
SYELTQPPSVSGTPGQRVAISCSGSSSNIGTRMVTWYQHVPGTAPKLLIFNNNQRPSGVPDRFSASKSGTSASLAIIGLQSDDEADYYCAAWDDNPKSYHFGTGTKVTVLGSRGGGGSGGGGSGGGGSLEMAQVQLQQWGAGLLKPSETLSLTCAVYGGSFSGYYWSWIRQPPGKGLEWIGEINHSGSTNYNPSLKSRVTISVDTSKNQFSLKLSSVTAADTAVYYCARAPQSWYVGDVWGQGTLVTVSS

SEQ ID NO: 506 - protein, 250 aa, Artificial Sequence
  source: /note="Description of Artificial Sequence: Synthetic scFv sequence"
SYELTQPPSVSGTPGQRVAISCSGSSSNIGTRMVTWYQHVPGTAPKLLIFNNNQRPSGVPDRFSASKSGTSASLAIIGLQSDDEADYYCATWDDNVKSYVFGTGTKVTVLGSRGGGGSGGGGSGGGGSLEMAQVQLQQWGAGLLKPSETLSLTCAVYGGSFSGYYWSWIRQPPGKGLEWIGEINHSGSTNYNPSLKSRVTISVDTSKNQFSLKLSSVTAADTAVYYCARAPQSWYVGDVWGQGTLVTVSS

SEQ ID NO: 507 - protein, 250 aa, Artificial Sequence
  source: /note="Description of Artificial Sequence: Synthetic scFv sequence"
SYELTQPPSVSGTPGQRVAISCSGSSSNIGTRMVTWYQHVPGTAPKLLIFNNNQRPSGVPDRFSASKSGTSASLAIIGLQSDDEADYYCATWDENPKSYVFGTGTKVTVLGSRGGGGSGGGGSGGGGSLEMAQVQLQQWGAGLLKPSETLSLTCAVYGGSFSGYYWSWIRQPPGKGLEWIGEINHSGSTNYNPSLKSRVTISVDTSKNQFSLKLSSVTAADTAVYYCARAPQSWYVGDVWGQGTLVTVSS

SEQ ID NO: 508 - protein, 250 aa, Artificial Sequence
  source: /note="Description of Artificial Sequence: Synthetic scFv sequence"
SYELTQPPSVSGTPGQRVAISCSGSSSNIGTRMVTWYQHVPGTAPKLLIFNNNQRPSGVPDRFSASKSGTSASLAIIGLQSDDEADYYCATWEDNRKSYVFGTGTKVTVLGSRGGGGSGGGGSGGGGSLEMAQVQLQQWGAGLLKPSETLSLTCAVYGGSFSGYYWSWIRQPPGKGLEWIGEINHSGSTNYNPSLKSRVTISVDTSKNQFSLKLSSVTAADTAVYYCARAPQSWYVGDVWGQGTLVTVSS

SEQ ID NO: 509 - protein, 250 aa, Artificial Sequence
  source: /note="Description of Artificial Sequence: Synthetic scFv sequence"
SYELTQPPSVSGTPGQRVAISCSGSSSNIGTRMVTWYQHVPGTAPKLLIFNNNQRPSGVPDRFSASKSGTSASLTIIGLQSDDEADYYCAAWDDNLKSYVFGTGTKVTVLGSRGGGGSGGGGSGGGGSLEMAQVQLQQWGAGLLKPSETLSLTCAVYGGSFSGYYWSWIRQPPGKGLEWIGEINHSGSTNYNPSLKSRVTMSVDTSKRQFSLKLSSVTAADTAVYYCARAPQSWYVGDVWGQGTLVTVSS

SEQ ID NO: 510 - protein, 250 aa, Artificial Sequence
  source: /note="Description of Artificial Sequence: Synthetic scFv sequence"
SYELTQPPSVSGTPGQRVAISCSGSSSNIGTRVVTWYQHVPGTAPKLLIFNNNQRPSGVPDRFSASKSGTSASLAIIGLQSDDEADYYCAAWDDNLKSYVFGTGTKVTVLGSRGGGGSGGGGSGGGGSLEMAQVQLQQWGAGLLKPSETLSLTCAVYGGSFSGYYWSWIRQPPGKGLEWIGEINHSGSTNYNPSLKSRVTISVDTSKNQFSLKLSSVTAADTAVYYCARAPQSWYVGDVWGQGTLVTVSS

SEQ ID NO: 511 - protein, 240 aa, Artificial Sequence
  source: /note="Description of Artificial Sequence: Synthetic scFv sequence"
DIQMTQSPSSLSASVGDRVTITCRASQGIRNNLAWYQQKPGKAPKRLIYAASNLQSGVPSRFTGSGSGTEFTLIVSSLQPEDFATYYCLQHHSYPLTSGGGTKVEIKRTGSTSGSGKPGSGEGSEVQVLESGGGLVQPGGSLRLSCAASGFTFSSYAMSWVRQAPGKGLEWVSAISGSGGSTNYADSVKGRFTISRDNSKNTLYLQMNSLRAEDTAVYYCAGSSGWSEYWGQGTLVTVSS

SEQ ID NO: 512 - protein, 126 aa, Artificial Sequence
  source: /note="Description of Artificial Sequence: Synthetic scFv sequence"
EAQLVQSGAEGKKPGSSVKVSCKAPGGTFNSYAISWVRQAPGQGLEWMGGIIPIFGTAYYAQKFQGRVTITADESTSTAYMELSSLRSEDTAVYYCAREEGPYCSSTSCYAAFDIWGRGTLVTVSS

SEQ ID NO: 513 - protein, 126 aa, Artificial Sequence
  source: /note="Description of Artificial Sequence: Synthetic scFv sequence"
EAQLVQSGAEGKKPGSSVKVSCKAPGGTFNSYAISWVRQAPGQGLEWMGGIIPIFGTAYYAQKFQGRVTITADESTSTAYMELSSLRSEDTAVYYCAREEGPYCSSTSCYGAFDIWGRGTLVTVSS

SEQ ID NO: 514 - protein, 126 aa, Artificial Sequence
  source: /note="Description of Artificial Sequence: Synthetic scFv sequence"
EVQLVQSGAEVKKLGSSVKVSCKASGGTFSSYAISWVRQAPGQGLEWVGGIIPIFGTANYAQKFQGRVKITADESASTAYMELSSLRSEDTAVYYCAREEGPYCSSTSCYGAFDIWGQGTLVTVSS

SEQ ID NO: 515 - protein, 126 aa, Artificial Sequence
  source: /note="Description of Artificial Sequence: Synthetic scFv sequence"
EVQLVQSGAEVKKPGSSVKVSCKASGGTFSSYAIGWVRQAPGQGLEWMGGIIPIFGIANYAQKFQGRVTITADESTSSAYMELSSLRSEDTAVYYCAREEGPYCSSTSCYAAFDIWGQGTLVTVSS

SEQ ID NO: 516 - protein, 126 aa, Artificial Sequence
  source: /note="Description of Artificial Sequence: Synthetic scFv sequence"
EVQLVQSGAEVKKPGSSVKVSCKASGGTFSSYAIGWVRQAPGQGLEWMGGIIPIFGIANYAQKFQGRVTITADESTSSAYMELSSLRSEDTAVYYCAREEGPYCSSTSCYGAFDIWGQGTLVTVSS

SEQ ID NO: 517 - protein, 126 aa, Artificial Sequence
  source: /note="Description of Artificial Sequence: Synthetic scFv sequence"
EVQLVQSGAEVKKPGSSVKVSCKASGGTFSSYAISWVRQAPGQGLEWMGGIIPIFGTANYAQKFQGRVTITADESTSTAYMELSSLRSEDTAVYYCAREEGPYCSSTSCYAAFDIWGQGTLVTVSS

SEQ ID NO: 518 - protein, 126 aa, Artificial Sequence
  source: /note="Description of Artificial Sequence: Synthetic scFv sequence"
EVQLVQSGAEVKKPGSSVKVSCKASGGTFSSYAISWVRQAPGQGLEWMGGIIPIFGTANYAQKFQGRVTITADESTSTAYMELSSLRSEDTAVYYCAREEGPYCSSTSCYGAFDIWGQGTLVTVSS

SEQ ID NO: 519 - protein, 126 aa, Artificial Sequence
  source: /note="Description of Artificial Sequence: Synthetic scFv sequence"
EVQLVQSGAEVKKPGSSVKVSCKASGGTFSSYAISWVRQAPGQGLEWVGGIIPIFGTANYAQKFQGRVKITADESASTAYMELSSLRSEDTAVYYCAREEGPYCSSTSCYAAFDIWGQGTLVTVSS

SEQ ID NO: 520 - protein, 126 aa, Artificial Sequence
  source: /note="Description of Artificial Sequence: Synthetic scFv sequence"
EVQLVQSGAEVKKPGSSVKVSCKASGGTFSSYAISWVRQAPGQGLEWVGGIIPIFGTANYAQKFQGRVKITADESASTAYMELSSLRSEDTAVYYCAREEGPYCSSTSCYGAFDIWGQGTLVTVSS

SEQ ID NO: 521 - protein, 261 aa, Artificial Sequence
  source: /note="Description of Artificial Sequence: Synthetic scFv sequence"
HAARPDVVMTQSPDSLAVSLGERATINCKSSQSLLDSDGKTYLNWLQQKPGQPPKRLISLVSKLDSGVPDRFSGSGSGTDFTLTISSLQAEDVAVYYCWQGTHFPGTFGGGTKVEIKGGGGSGGGGSGGGGSGGGGSEIQLVQSGAEVKKPGATVKISCKGSGFNIEDYYIHWVQQAPGKGLEWMGRIDPENDETKYGPIFQGRVTITADTSTNTVYMELSSLRSEDTAVYYCAFRGGVYWGQGTTVTVSSGSHHHHHHHH

SEQ ID NO: 522 - protein, 269 aa, Artificial Sequence
  source: /note="Description of Artificial Sequence: Synthetic scFv sequence"
MALPVTALLLPLALLLHAARPDIQMTQSPSSLSASVGDRVTITCRASQGIRNNLAWYQQKPGKAPKRLIYAASNLQSGVPSRFTGSGSGTEFTLIVSSLQPEDFATYYCLQHHSYPLTSGGGTKVEIKRTGSTSGSGKPGSGEGSEVQVLESGGGLVQPGGSLRLSCAASGFTFSSYAMSWVRQAPGKGLEWVSAISGSGGSTNYADSVKGRFTISRDNSKNTLYLQMNSLRAEDTAVYYCAGSSGWSEYWGQGTLVTVSSHHHHHHHH

SEQ ID NO: 523 - protein, 278 aa, Artificial Sequence
  source: /note="Description of Artificial Sequence: Synthetic scFv sequence"
MALPVTALLLPLALLLHAARPDVVMTQSPDSLAVSLGERATINCKSSQSLLDSDGKTYLNWLQQKPGQPPKRLISLVSKLDSGVPDRFSGSGSGTDFTLTISSLQAEDVAVYYCWQGTHFPGTFGGGTKVEIKGGGGSGGGGSGGGGSGGGGSEIQLVQSGAEVKKPGESLRISCKGSGFNIEDYYIHWVRQMPGKGLEWMGRIDPENDETKYGPIFQGHVTISADTSINTVYLQWSSLKASDTAMYYCAFRGGVYWGQGTTVTVSSGSHHHHHHHHH

SEQ ID NO: 524 - protein, 277 aa, Artificial Sequence
  source: /note="Description of Artificial Sequence: Synthetic scFv sequence"
MALPVTALLLPLALLLHAARPDVVMTQSPLSLPVTLGQPASISCKSSQSLLDSDGKTYLNWLQQRPGQSPRRLISLVSKLDSGVPDRFSGSGSGTDFTLKISRVEAEDVGVYYCWQGTHFPGTFGGGTKVEIKGGGGSGGGGSGGGGSGGGGSEIQLVQSGAEVKKPGATVKISCKGSGFNIEDYYIHWVQQAPGKGLEWMGRIDPENDETKYGPIFQGRVTITADTSTNTVYMELSSLRSEDTAVYYCAFRGGVYWGQGTTVTVSSGSHHHHHHHH

SEQ ID NO: 525 - protein, 277 aa, Artificial Sequence
  source: /note="Description of Artificial Sequence: Synthetic scFv sequence"
MALPVTALLLPLALLLHAARPDVVMTQSPLSLPVTLGQPASISCKSSQSLLDSDGKTYLNWLQQRPGQSPRRLISLVSKLDSGVPDRFSGSGSGTDFTLKISRVEAEDVGVYYCWQGTHFPGTFGGGTKVEIKGGGGSGGGGSGGGGSGGGGSEIQLVQSGAEVKKPGESLRISCKGSGFNIEDYYIHWVRQMPGKGLEWMGRIDPENDETKYGPIFQGHVTISADTSINTVYLQWSSLKASDTAMYYCAFRGGVYWGQGTTVTVSSGSHHHHHHHH

SEQ ID NO: 526 - protein, 274 aa, Artificial Sequence
  source: /note="Description of Artificial Sequence: Synthetic scFv sequence"
MALPVTALLLPLALLLHAARPEIQLQQSGAELVKPGASVKLSCTGSGFNIEDYYIHWVKQRTEQGLEWIGRIDPENDETKYGPIFQGRATITADTSSNTVYLQLSSLTSEDTAVYYCAFRGGVYWGPGTTLTVSSGGGGSGGGGSGGGGSHMDVVMTQSPLTLSVAIGQSASISCKSSQSLLDSDGKTYLNWLLQRPGQSPKRLISLVSKLDSGVPDRFTGSGSGTDFTLRISRVEAEDLGIYYCWQGTHFPGTFGGGTKLEIKGSHHHHHHHH

SEQ ID NO: 527 - protein, 277 aa, Artificial Sequence
  source: /note="Description of Artificial Sequence: Synthetic scFv sequence"
MALPVTALLLPLALLLHAARPEIQLVQSGAEVKKPGATVKISCKGSGFNIEDYYIHWVQQAPGKGLEWMGRIDPENDETKYGPIFQGRVTITADTSTNTVYMELSSLRSEDTAVYYCAFRGGVYWGQGTTVTVSSGGGGSGGGGSGGGGSGGGGSDVVMTQSPDSLAVSLGERATINCKSSQSLLDSDGKTYLNWLQQKPGQPPKRLISLVSKLDSGVPDRFSGSGSGTDFTLTISSLQAEDVAVYYCWQGTHFPGTFGGGTKVEIKGSHHHHHHHH

SEQ ID NO: 528 - protein, 277 aa, Artificial Sequence
  source: /note="Description of Artificial Sequence: Synthetic scFv sequence"
MALPVTALLLPLALLLHAARPEIQLVQSGAEVKKPGATVKISCKGSGFNIEDYYIHWVQQAPGKGLEWMGRIDPENDETKYGPIFQGRVTITADTSTNTVYMELSSLRSEDTAVYYCAFRGGVYWGQGTTVTVSSGGGGSGGGGSGGGGSGGGGSDVVMTQSPLSLPVTLGQPASISCKSSQSLLDSDGKTYLNWLQQRPGQSPRRLISLVSKLDSGVPDRFSGSGSGTDFTLKISRVEAEDVGVYYCWQGTHFPGTFGGGTKVEIKGSHHHHHHHH

SEQ ID NO: 529 - protein, 278 aa, Artificial Sequence
  source: /note="Description of Artificial Sequence: Synthetic scFv sequence"
MALPVTALLLPLALLLHAARPEIQLVQSGAEVKKPGESLRISCKGSGFNIEDYYIHWVRQMPGKGLEWMGRIDPENDETKYGPIFQGHVTISADTSINTVYLQWSSLKASDTAMYYCAFRGGVYWGQGTTVTVSSGGGGSGGGGSGGGGSGGGGSDVVMTQSPDSLAVSLGERATINCKSSQSLLDSDGKTYLNWLQQKPGQPPKRLISLVSKLDSGVPDRFSGSGSGTDFTLTISSLQAEDVAVYYCWQGTHFPGTFGGGTKVEIKGSHHHHHHHHH

SEQ ID NO: 530 - protein, 277 aa, Artificial Sequence
  source: /note="Description of Artificial Sequence: Synthetic scFv sequence"
MALPVTALLLPLALLLHAARPEIQLVQSGAEVKKPGESLRISCKGSGFNIEDYYIHWVRQMPGKGLEWMGRIDPENDETKYGPIFQGHVTISADTSINTVYLQWSSLKASDTAMYYCAFRGGVYWGQGTTVTVSSGGGGSGGGGSGGGGSGGGGSDVVMTQSPLSLPVTLGQPASISCKSSQSLLDSDGKTYLNWLQQRPGQSPRRLISLVSKLDSGVPDRFSGSGSGTDFTLKISRVEAEDVGVYYCWQGTHFPGTFGGGTKVEIKGSHHHHHHHH

SEQ ID NO: 531 - protein, 363 aa, Artificial Sequence
  source: /note="Description of Artificial Sequence: Synthetic scFv sequence"
MATGSRTSLLLAFGLLCLPWLQEGSAAPDVQDCPECTLQENPFFSQPGAPILQCMGCCFSRAYPTPLRSKKTMLVQKNVTSESTCCVAKSYNRVTVMGGFKVENHTACHCSTCGFSASPAFFQVQLKQSGPGLVQPSQSLSITCTVSGFSLTNYGVHWVRQSPGKGLEWLGVIWSGGNTDYNTPFTSRLSINKDNSKSQVFFKMNSLQSNDTAIYYCARALTYYDYEFAYWGQGTLVTVSAGGGGSGGGGSGGGGSDILLTQSPVILSVSPGERVSFSCRASQSIGTNIHWYQQRTNGSPRLLIKYASESISGIPSRFSGSGSGTDFTLSINSVESEDIADYYCQQNNNWPTTFGAGTKLELK

SEQ ID NO: 532 - protein, 232 aa, Artificial Sequence
  source: /note="Description of Artificial Sequence: Synthetic scFv sequence"
MATGSRTSLLLAFGLLCLPWLQEGSAAPDVQDCPECTLQENPFFSQPGAPILQCMGCCFSRAYPTPLRSKKTMLVQKNVTSESTCCVAKSYNRVTVMGGFKVENHTACHCSTCQVQLKQSGPGLVQPSQSLSITCTVSGFSLTNYGVHWVRQSPGKGLEWLGVIWSGGNTDYNTPFTSRLSINKDNSKSQVFFKMNSLQSNDTAIYYCARALTYYDYEFAYWGQGTLVTVSA

SEQ ID NO: 533 - protein, 353 aa, Artificial Sequence
  source: /note="Description of Artificial Sequence: Synthetic scFv sequence"
MATGSRTSLLLAFGLLCLPWLQEGSAAPDVQDCPECTLQENPFFSQPGAPILQCMGCCFSRAYPTPLRSKKTMLVQKNVTSESTCCVAKSYNRVTVMGGFKVENHTACHCSTCQVQLKQSGPGLVQPSQSLSITCTVSGFSLTNYGVHWVRQSPGKGLEWLGVIWSGGNTDYNTPFTSRLSINKDNSKSQVFFKMNSLQSNDTAIYYCARALTYYDYEFAYWGQGTLVTVSAGGGGSGGGGSGGGGSDILLTQSPVILSSPGERVSFSCRASQSIGTNIHWYQQRTNGSPRLLIKYASESISGIPSRFSGSGSGTDFTLSINSVESEDIADYYCQQNNNWPTTFGAGTKLELK

SEQ ID NO: 534 - protein, 222 aa, Artificial Sequence
  source: /note="Description of Artificial Sequence: Synthetic scFv sequence"
MATGSRTSLLLAFGLLCLPWLQEGSADILLTQSPVILSVSPGERVSFSCRASQSIGTNIHWYQQRTNGSPRLLIKYASESISGIPSRFSGSGSGTDFTLSINSVESEDIADYYCQQNNNWPTTFGAGTKLELKAAAPDVQDCPECTLQENPFFSQPGAPILQCMGCCFSRAYPTPLRSKKTMLVQKNVTSESTCCVAKSYNRVTVMGGFKVENHTACHCSTC

SEQ ID NO: 535 - protein, 616 aa, Artificial Sequence
  source: /note="Description of Artificial Sequence: Synthetic scFv sequence"
MATGSRTSLLLAFGLLCLPWLQEGSADIQMTQSPSSLSASVGDRVTITCITSNDIDDDMNWYQQKPGKAPKLLISEGNTLRPGVPSRFSGSGYGTDFTLTISSLQPEDVATYYCFQSDNLPYTFGQGTKVEIKGGGGSGGGGSGGGGSEVQLVQSGAEVKKPGASVKVSCKASGDTFTTYVIHWMRQAPGQGLEWIGYINPYNDGTKYNEKFKGRVTITSDKSTSTAYMELSSLRSEDTAVYYCARIYYDYDGDYWGQGTLVTVSSAAAPDVQDCPECTLQENPFFSQPGAPILQCMGCCFSRAYPTPLRSKKTMLVQKNVTSESTCCVAKSYNRVTVMGGFKVENHTACHCSTCGGGGSGGGGSGGGGSGGGGSQVQLKQSGPGLVQPSQSLSITCTVSGFSLTNYGVHWVRQSPGKGLEWLGVIWSGGNTDYNTPFTSRLSINKDNSKSQVFFKMNSLQSNDTAIYYCARALTYYDYEFAYWGQGTLVTVSAGGGGSGGGGSGGGGSDILLTQSPVILSVSPGERVSFSCRASQSIGTNIHWYQQRTNGSPRLLIKYASESISGIPSRFSGSGSGTDFTLSINSVESEDIADYYCQQNNNWPTTFGAGTKLELK

SEQ ID NO: 536 - protein, 658 aa, Artificial Sequence
  source: /note="Description of Artificial Sequence: Synthetic scFv sequence"
MATGSRTSLLLAFGLLCLPWLQEGSAEVQLVESGGGLVQPGGSLRLSCAASGYTFTNYGMNWVRQAPGKGLEWVGWINTYTGEPTYAADFKRRFTFSLDTSKSTAYLQMNSLRAEDTAVYYCAKYPHYYGSSHWYFDVWGQGTLVTVSSGGGGSGGGGSGGGGSDIQMTQSPSSLSASVGDRVTITCSASQDISNYLNWYQQKPGKAPKVLIYFTSSLHSGVPSRFSGSGSGTDFTLTISSLQPEDFATYYCQQYSTVPWTFGQGTKVEIKRSKEPLRPRCRPINATLAVEKEGCPVCITVNTTICAGYCPTMTRVLQGVLPALPQVVCNYRDVRFESIRLPGCPRGVNPVVSYAVALSCQCALCRRSTTDCGGPKDHPLTCDDPRFQDSSSSKAPPPSLPSPSRLPGPSDTPILPQQVQLKQSGPGLVQPSQSLSITCTVSGFSLTNYGVHWVRQSPGKGLEWLGVIWSGGNTDYNTPFTSRLSINKDNSKSQVFFKMNSLQSNDTAIYYCARALTYYDYEFAYWGQGTLVTVSAGGGGSGGGGSGGGGSDILLTQSPVILSVSPGERVSFSCRASQSIGTNIHWYQQRTNGSPRLLIKYASESISGIPSRFSGSGSGTDFTLSINSVESEDIADYYCQQNNNWPTTFGAGTKLELK

SEQ ID NO: 537 - protein, 616 aa, Artificial Sequence
  source: /note="Description of Artificial Sequence: Synthetic scFv sequence"
MATGSRTSLLLAFGLLCLPWLQEGSAEVQLVQSGAEVKKPGASVKVSCKASGDTFTTYVIHWMRQAPGQGLEWIGYINPYNDGTKYNEKFKGRVTITSDKSTSTAYMELSSLRSEDTAVYYCARIYYDYDGDYWGQGTLVTVSSGGGGSGGGGSGGGGSDIQMTQSPSSLSASVGDRVTITCITSNDIDDDMNWYQQKPGKAPKLLISEGNTLRPGVPSRFSGSGYGTDFTLTISSLQPEDVATYYCFQSDNLPYTFGQGTKVEIKAAAPDVQDCPECTLQENPFFSQPGAPILQCMGCCFSRAYPTPLRSKKTMLVQKNVTSESTCCVAKSYNRVTVMGGFKVENHTACHCSTCGGGGSGGGGSGGGGSGGGGSQVQLKQSGPGLVQPSQSLSITCTVSGFSLTNYGVHWVRQSPGKGLEWLGVIWSGGNTDYNTPFTSRLSINKDNSKSQVFFKMNSLQSNDTAIYYCARALTYYDYEFAYWGQGTLVTVSAGGGGSGGGGSGGGGSDILLTQSPVILSVSPGERVSFSCRASQSIGTNIHWYQQRTNGSPRLLIKYASESISGIPSRFSGSGSGTDFTLSINSVESEDIADYYCQQNNNWPTTFGAGTKLELK

SEQ ID NO: 538 - protein, 359 aa, Artificial Sequence
  source: /note="Description of Artificial Sequence: Synthetic scFv sequence"
MATGSRTSLLLAFGLLCLPWLQEGSAQVQLQESGPGLVKPSETLSLTCTVSGYSITGGYLWNWIRQPPGKGLEWIGYISYDGTNNYKPSLKDRVTISRDTSKNQFSLKLSSVTAADTAVYYCARYGRVFFDYWGQGTLVTVSSGGGGSGGGGSGGGGSDIVMTQSPLSLPVTPGEPASISCRSSQSIVHSNGNTYLQWYLQKPGQSPQLLIYKVSNRLYGVPDRFSGSGSGTDFTLKISRVEAEDVGVYYCFQGSHVPWTFGQGTKVEIKAAAPDVQDCPECTLQENPFFSQPGAPILQCMGCCFSRAYPTPLRSKKTMLVQKNVTSESTCCVAKSYNRVTVMGGFKVENHTACHCSTC

SEQ ID NO: 539 - protein, 418 aa, Artificial Sequence
  source: /note="Description of Artificial Sequence: Synthetic scFv sequence"
MATGSRTSLLLAFGLLCLPWLQEGSAQVQLQESGPGLVKPSETLSLTCTVSGYSITGGYLWNWIRQPPGKGLEWIGYISYDGTNNYKPSLKDRVTISRDTSKNQFSLKLSSVTAADTAVYYCARYGRVFFDYWGQGTLVTVSSGGGGSGGGGSGGGGSDIVMTQSPLSLPVTPGEPASISCRSSQSIVHSNGNTYLQWYLQKPGQSPQLLIYKVSNRLYGVPDRFSGSGSGTDFTLKISRVEAEDVGVYYCFQGSHVPWTFGQGTKVEIKAAASKEPLRPRCRPINATLAVEKEGCPVCITVNTTICAGYCPTMTRVLQGVLPALPQVVCNYRDVRFESIRLPGCPRGVNPVVSYAVALSCQCALCRRSTTDCGGPKDHPLTCDDPRFQDSSSSKAPPPSLPSPSRLPGPSDTPILPQ

SEQ ID NO: 540 - protein, 278 aa, Artificial Sequence
  source: /note="Description of Artificial Sequence: Synthetic scFv sequence"
MATGSRTSLLLAFGLLCLPWLQEGSASKEPLRPRCRPINATLAVEKEGCPVCITVNTTICAGYCPTMTRVLQGVLPALPQVVCNYRDVRFESIRLPGCPRGVNPVVSYAVALSCQCALCRRSTTDCGGPKDHPLTCDDPRFQDSSSSKAPPPSLPSPSRLPGPSDTPILPQDILLTQSPVILSVSPGERVSFSCRASQSIGTNIHWYQQRTNGSPRLLIKYASESISGIPSRFSGSGSGTDFTLSINSVESEDIADYYCQQNNNWPTTFGAGTKLELK

SEQ ID NO: 541 - protein, 412 aa, Artificial Sequence
  source: /note="Description of Artificial Sequence: Synthetic scFv sequence"
MATGSRTSLLLAFGLLCLPWLQEGSASKEPLRPRCRPINATLAVEKEGCPVCITVNTTICAGYCPTMTRVLQGVLPALPQVVCNYRDVRFESIRLPGCPRGVNPVVSYAVALSCQCALCRRSTTDCGGPKDHPLTCDDPRFQDSSSSKAPPPSLPSPSRLPGPSDTPILPQQVQLKQSGPGLVQPSQSLSITCTVSGFSLTNYGVHWVRQSPGKGLEWLGVIWSGGNTDYNTPFTSRLSINKDNSKSQVFFKMNSLQSNDTAIYYCARALTYYDYEFAYWGQGTLVTVSAGGGGSGGGGSGGGGSDILLTQSPVILSVSPGERVSFSCRASQSIGTNIHWYQQRTNGSPRLLIKYASESISGIPSRFSGSGSGTDFTLSINSVESEDIADYYCQQNNNWPTTFGAGTKLELK

SEQ ID NO: 542 - protein, 108 aa, Artificial Sequence
  source: /note="Description of Artificial Sequence: Synthetic scFv sequence"
QSVLTQDPAASVALGQTVKITCQGDSLRSYFASWYQQKPGQAPTLVMYARNDRPAGVPDRFSGSKSGTSASLAISGLQSEDEADYYCAAWDDSLNGYLFGAGTKLTVL

SEQ ID NO: 543 - protein, 108 aa, Artificial Sequence
  source: /note="Description of Artificial Sequence: Synthetic scFv sequence"
QSVLTQDPAVSAALGQTVKITCQGDSLRSYFASWYQQKPGQAPTLVMYARNDRPAGVPDRFSGSKSGTSASLAISGLQSEDEADYYCAAWDDSLNGYLFGAGTKLTVL

SEQ ID NO: 544 - protein, 108 aa, Artificial Sequence
  source: /note="Description of Artificial Sequence: Synthetic scFv sequence"
QSVLTQDPAVSVALGQTVKITCQGDSLRSYFASWYQQKPGQAPTLVMYARNDRPAGVPDRFSGSKSGTSASLAISGLQPEDEADYYCAAWDDSLNGYLFGAGTKLTVL

SEQ ID NO: 545 - protein, 108 aa, Artificial Sequence
  source: /note="Description of Artificial Sequence: Synthetic scFv sequence"
QSVLTQDPAVSVALGQTVKITCQGDSLRSYFASWYQQKPGQAPTLVMYARNDRPAGVPDRFSGSKSGTSASLAISGLQSEDEADYYCAAWDDSLNGYLFGAGTKLTVL

SEQ ID NO: 546 - protein, 108 aa, Artificial Sequence
  source: /note="Description of Artificial Sequence: Synthetic scFv sequence"
QSVLTQDPAVSVALGQTVKITCQGDSLRSYLASWYQQKPGQAPTLVTYARNDRPAGVPDRFSGSKSGTSASLAISGLQSEDEADYYCAAWDDSLNGYLFGAGTKLTVL

SEQ ID NO: 547 - protein, 330 aa, Artificial Sequence
  source: /note="Description of Artificial Sequence: Synthetic scFv sequence"
QVQLKQSGPGLVQPSQSLSITCTVSGFSLTNYGVHWVRQSPGKGLEWLGVIWSGGNTDYNTPFTSRLSINKDNSKSQVFFKMNSLQSNDTAIYYCARALTYYDYEFAYWGQGTLVTVSAGGGGSGGGGSGGGGSDILLTQSPVILSVSPGERVSFSCRASQSIGTNIHWYQQRTNGSPRLLIKYASESISGIPSRFSGSGSGTDFTLSINSVESEDIADYYCQQNNNWPTTFGAGTKLELKAAAPDVQDCPECTLQENPFFSQPGAPILQCMGCCFSRAYPTPLRSKKTMLVQKNVTSESTCCVAKSYNRVTVMGGFKVENHTACHCSTC

SEQ ID NO: 548 - protein, 227 aa, Artificial Sequence
  source: /note="Description of Artificial Sequence: Synthetic scFv sequence"
SVKLSCTGSGFNIEDYYIHWVKQRTEQGLEWIGRIDPENDETKYGPIFQGRATITADTSSNTVYLQLSSLTSEDTAVYYCAFRGGVYWGPGTTLTVSSGGGGSGGGGSGGGGSHMDVVMTQSPLTLSVAIGQSASISCKSSQSLLDSDGKTYLNWLLQRPGQSPKRLISLVSKLDSGVPDRFTGSGSGTDFTLRISRVEAEDLGIYYCWQGTHFPGTFGGGTKLEIK

SEQ ID NO: 549 - protein, 249 aa, Artificial Sequence
  source: /note="Description of Artificial Sequence: Synthetic scFv sequence"
SYELTQPPSVSVAPGQTARITCSGDALGDKYASWYQQKPGQAPVLVIYEDSKRPSGIPERFSGSNSGNTATLTISGTQAEDEADYYCSVWDGDWGMPVFGGGTKLTVLGSGGSTITSYNVYYTKLSSSGSEVQLVQSGAEVKKPGESLKISCKGSGYSFTSYWIGWVRQMPGKGLEWMGIIYPGDSDTRYSPSFQGQVTISADKSISTAYLQWSSLKASDTAMYYCARGIIYPSNVAVWGQGTLVTVSS

SEQ ID NO: 550 - protein, 246 aa, Artificial Sequence
  source: /note="Description of Artificial Sequence: Synthetic scFv sequence"
DVVMTQSPDSLAVSLGERATINCKSSQSLLDSDGKTYLNWLQQKPGQPPKRLISLVSKLDSGVPDRFSGSGSGTDFTLTISSLQAEDVAVYYCWQGTHFPGTFGGGTKVEIKGGGGSGGGGSGGGGSGGGGSEIQLVQSGAEVKKPGATVKISCKGSGFNIEDYYIHWVQQAPGKGLEWMGRIDPENDETKYGPIFQGRVTITADTSTNTVYMELSSLRSEDTAVYYCAFRGGVYWGQGTTVTVSS

SEQ ID NO: 551 - protein, 246 aa, Artificial Sequence
  source: /note="Description of Artificial Sequence: Synthetic scFv sequence"
EIQLVQSGAEVKKPGESLRISCKGSGFNIEDYYIHWVRQMPGKGLEWMGRIDPENDETKYGPIFQGHVTISADTSINTVYLQWSSLKASDTAMYYCAFRGGVYWGQGTTVTVSSGGGGSGGGGSGGGGSGGGGSDVVMTQSPLSLPVTLGQPASISCKSSQSLLDSDGKTYLNWLQQRPGQSPRRLISLVSKLDSGVPDRFSGSGSGTDFTLKISRVEAEDVGVYYCWQGTHFPGTFGGGTKVEIK

SEQ ID NO: 552 - protein, 246 aa, Artificial Sequence
  source: /note="Description of Artificial Sequence: Synthetic scFv sequence"
DVVMTQSPLSLPVTLGQPASISCKSSQSLLDSDGKTYLNWLQQRPGQSPRRLISLVSKLDSGVPDRFSGSGSGTDFTLKISRVEAEDVGVYYCWQGTHFPGTFGGGTKVEIKGGGGSGGGGSGGGGSGGGGSEIQLVQSGAEVKKPGESLRISCKGSGFNIEDYYIHWVRQMPGKGLEWMGRIDPENDETKYGPIFQGHVTISADTSINTVYLQWSSLKASDTAMYYCAFRGGVYWGQGTTVTVSS

SEQ ID NO: 553 - protein, 246 aa, Artificial Sequence
  source: /note="Description of Artificial Sequence: Synthetic scFv sequence"
EIQLVQSGAEVKKPGATVKISCKGSGFNIEDYYIHWVQQAPGKGLEWMGRIDPENDETKYGPIFQGRVTITADTSTNTVYMELSSLRSEDTAVYYCAFRGGVYWGQGTTVTVSSGGGGSGGGGSGGGGSGGGGSDVVMTQSPLSLPVTLGQPASISCKSSQSLLDSDGKTYLNWLQQRPGQSPRRLISLVSKLDSGVPDRFSGSGSGTDFTLKISRVEAEDVGVYYCWQGTHFPGTFGGGTKVEIK

SEQ ID NO: 554 - protein, 246 aa, Artificial Sequence
  source: /note="Description of Artificial Sequence: Synthetic scFv sequence"
EIQLVQSGAEVKKPGESLRISCKGSGFNIEDYYIHWVRQMPGKGLEWMGRIDPENDETKYGPIFQGHVTISADTSINTVYLQWSSLKASDTAMYYCAFRGGVYWGQGTTVTVSSGGGGSGGGGSGGGGSGGGGSDVVMTQSPDSLAVSLGERATINCKSSQSLLDSDGKTYLNWLQQKPGQPPKRLISLVSKLDSGVPDRFSGSGSGTDFTLTISSLQAEDVAVYYCWQGTHFPGTFGGGTKVEIK

SEQ ID NO: 555 - protein, 246 aa, Artificial Sequence
  source: /note="Description of Artificial Sequence: Synthetic scFv sequence"
DVVMTQSPDSLAVSLGERATINCKSSQSLLDSDGKTYLNWLQQKPGQPPKRLISLVSKLDSGVPDRFSGSGSGTDFTLTISSLQAEDVAVYYCWQGTHFPGTFGGGTKVEIKGGGGSGGGGSGGGGSGGGGSEIQLVQSGAEVKKPGESLRISCKGSGFNIEDYYIHWVRQMPGKGLEWMGRIDPENDETKYGPIFQGHVTISADTSINTVYLQWSSLKASDTAMYYCAFRGGVYWGQGTTVTVSS

SEQ ID NO: 556 - protein, 246 aa, Artificial Sequence
  source: /note="Description of Artificial Sequence: Synthetic scFv sequence"
DVVMTQSPLSLPVTLGQPASISCKSSQSLLDSDGKTYLNWLQQRPGQSPRRLISLVSKLDSGVPDRFSGSGSGTDFTLKISRVEAEDVGVYYCWQGTHFPGTFGGGTKVEIKGGGGSGGGGSGGGGSGGGGSEIQLVQSGAEVKKPGATVKISCKGSGFNIEDYYIHWVQQAPGKGLEWMGRIDPENDETKYGPIFQGRVTITADTSTNTVYMELSSLRSEDTAVYYCAFRGGVYWGQGTTVTVSS

SEQ ID NO: 557 - protein, 246 aa, Artificial Sequence
  source: /note="Description of Artificial Sequence: Synthetic scFv sequence"
EIQLVQSGAEVKKPGATVKISCKGSGFNIEDYYIHWVQQAPGKGLEWMGRIDPENDETKYGPIFQGRVTITADTSTNTVYMELSSLRSEDTAVYYCAFRGGVYWGQGTTVTVSSGGGGSGGGGSGGGGSGGGGSDVVMTQSPDSLAVSLGERATINCKSSQSLLDSDGKTYLNWLQQKPGQPPKRLISLVSKLDSGVPDRFSGSGSGTDFTLTISSLQAEDVAVYYCWQGTHFPGTFGGGTKVEIK

SEQ ID NO: 558 - protein, 262 aa, Artificial Sequence
  source: /note="Description of Artificial Sequence: Synthetic scFv sequence"
MVLLVTSLLLCELPHPAFLLIPDIQMTQSPSSLSASVGDRVTITCRASQGIRNNLAWYQQKPGKAPKRLIYAASNLQSGVPSRFTGSGSGTEFTLIVSSLQPEDFATYYCLQHHSYPLTSGGGTKVEIKRTGSTSGSGKPGSGEGSEVQVLESGGGLVQPGGSLRLSCAASGFTFSSYAMSWVRQAPGKGLEWVSAISGSGGSTNYADSVKGRFTISRDNSKNTLYLQMNSLRAEDTAVYYCAGSSGWSEYWGQGTLVTVSS

SEQ ID NO: 559 - protein, 243 aa, Artificial Sequence
  source: /note="Description of Artificial Sequence: Synthetic scFv sequence"
EIQLQQSGAELVKPGASVKLSCTGSGFNIEDYYIHWVKQRTEQGLEWIGRIDPENDETKYGPIFQGRATITADTSSNTVYLQLSSLTSEDTAVYYCAFRGGVYWGPGTTLTVSSGGGGSGGGGSGGGGSHMDVVMTQSPLTLSVAIGQSASISCKSSQSLLDSDGKTYLNWLLQRPGQSPKRLISLVSKLDSGVPDRFTGSGSGTDFTLRISRVEAEDLGIYYCWQGTHFPGTFGGGTKLEIK

SEQ ID NO: 560 - protein, 240 aa, Artificial Sequence
  source: /note="Description of Artificial Sequence: Synthetic scFv sequence"
MKYLLPTAAAGLLLLAASGAHAQVQLVQSGGGLVKPGGSLRLSCAASGFTFSSYSMNWVRQAPGKGLEWVANIKPDGSERHSVDSVKGRFTISRDNSKNSLYLQMNSLRAEDTAVYYCARPGAGRLDYWGQGTLVTVSSGGGGSGGGGSGGGGSNFMLTQDAAVSVALGQTVRITCQGDSLRSYYASWYQQKPGQAPVLVVYGKNNRPSGIPDRFSGSSSGNTASLTITGAQAEDEADYY

SEQ ID NO: 561 - protein, 248 aa, Artificial Sequence
  source: /note="Description of Artificial Sequence: Synthetic scFv sequence"
QVQLQESGGGLVKPGGSLRLSCAASGFTFSSYWMSWVRQAPGKGLEWVANINRDGSASYYVDSVKGRFTISRDDAKNSLYLQMNSLRAEDTAVYYCARDRGVGYFDLWGRGTLVTVSSASTGGGGSGGGGSGGGGSQSALTQPASVSGSPGQSITISCTGTSSDVGGYNFVSWYQQHPGKAPKLMIYDVSDRPSGVSDRFSGSKSGNTASLIISGLQADDEADYYCSSYGSSSTHVIFGGGTKVTVLG

SEQ ID NO: 562 - protein, 246 aa, Artificial Sequence
  source: /note="Description of Artificial Sequence: Synthetic scFv sequence"
QVQLVESGGGLVQPGGSLRLSCAASGFTFRSYAMSWVRQAPGKGLEWVSAISGRGDNTYYADSVKGRFTISRDNSKNTLYLQMNSLRAEDTAVYYCAKMTSNAFAFDYWGQGTLVTVSSGGGGSGGGGSGGGGSQSVLTQPPSVSGAPGQRVTISCTGSSSNIGAGYGVHWYQQLPGTAPKLLIYGNTNRPSGVPDRFSGFKSGTSASLAITGLQAEDEADYYCQSYDSSLSGWVFGGGTKLTVLG

SEQ ID NO: 563 - protein, 255 aa, Artificial Sequence
  source: /note="Description of Artificial Sequence: Synthetic scFv sequence"
QVQLVQSGAEVKKPGESLKISCKGSGYSFTSYWIAWVRQMPGKGLEYMGLIYPGDSDTKYSPSFQGQVTISVDKSVSTAYLQWSSLKPSDSAVYFCARHDVGYCTDRTCAKWPEWLGVWGQGTLVTVSSGGGGSSGGGSGGGGSQSVLTQPPSVSAAPGQKVTISCSGSSSNIGNNYVSWYQQLPGTAPKLLIYDHTNRPAGVPDRFSGSKSGTSASLAISGFRSEDEADYYCASWDYTLSGWVFGGGTKLTVLG

SEQ ID NO: 564 - protein, 242 aa, Artificial Sequence
  source: /note="Description of Artificial Sequence: Synthetic scFv sequence"
QVQLVESGGGLVQPGGSLRLSCAASGFTFSSYAMGWVRQAPGKGLEWVSSISGSSRYIYYADSVKGRFTISRDNSKNTLYLQMNSLRAEDTAVYYCAKMDASGSYFNFWGQGTLVTVSSGGGGSGGGGSGGGGSETTLTQSPSFLSAFVGDRITITCRASPGIRNYLAWYQQKPGKAPKLLIYAASTLQSGVPSRFSGSGSGTDFTLTISSLQPEDFATYYCQQYNSYPLSFGGGTKVEIKR

SEQ ID NO: 565 - protein, 241 aa, Artificial Sequence
  source: /note="Description of Artificial Sequence: Synthetic scFv sequence"
EVQLLESGGGLVQPGGSLRLSCAASGFTFSSYAMSWVRQAPGKGLEWVSQIDPWGQETLYADSVKGRFTISRDNSKNTLYLQMNSLRAEDTAVYYCAKLTGRFDYWGQGTLVTVSSGGGGSGGGGSGGGGSTDIQMTQSPSSLSASVGDRVTITCRASQSISSYLNWYQQKPGKAPKLLIYSASQLQSGVPSRFSGSGSGTDFTLTISSLQPEDFATYYCQQGPGTPNTFGQGTKVEIKRA

SEQ ID NO: 566 - protein, 247 aa, Artificial Sequence
  source: /note="Description of Artificial Sequence: Synthetic scFv sequence"
DIQMTQSPSSLSASVGDRVTITCRASQSISSYLNWYQQKPGKAPKLLIYAASSLQSGVPSRFSGSGSGTDFTLTISSLQPEDFATYYCQQSYSTPFTFGPGTKVDIKRSRGGGGSGGGGSGGGGSLEMAEVQLVQSGAEVKKPGSSVKVSCKASGGTFSSYAISWVRQAPGQGLEWMGGIIPIFGTANYAQKFQGRVTITADESTSTAYMELSSLRSEDTAMYYCARYWGYDSYDEWGQGTLVTVSS

SEQ ID NO: 567 - protein, 272 aa, Artificial Sequence
  source: /note="Description of Artificial Sequence: Synthetic scFv sequence"
DIQMTQSPSSLSASVGDRVTITCRASQSISSYLNWYQQKPGKAPKLLIYAASSLQSGVPSRFSGSGSGTDFTLTISSLQPEDFATYYCQQSYSTPFTFGPGTKVDIKRSRGGGGSGGGGSGGGGSLEMAEVQLVQSGAEVKKPGSSVKVSCKASGGTFSSYAISWVRQAPGQGLEWMGGIIPIFGTANYAQKFQGRVTITADESTSTAYMELSSLRSEDTAMYYCARYWGYDSYDEWGQGTLVTVSSTSGQAGQHHHHHHGAYPYDVPDYAS

SEQ ID NO: 568 - protein, 253 aa, Artificial Sequence
  source: /note="Description of Artificial Sequence: Synthetic scFv sequence"
DVVMTQSPPSLSVTPGEPASITCRSSQSLLERNAYNYLDWYLQRPGQSPQLLIYLGSNRAAGVPDRFSGSGSGRDFTLKISRVEPEDVGVYYCMQALQAPFTFGGGTKVEIKRSRGGGGSGGGGSGGGGSLEMAEVQLVQSGGGLVQPGGSLRLSCAASGFTFSSYAMSWVRQAPGKGLEWVSAISGSGGSTYYADSVKGRFTISRDNSKNTLYLQMNSLRAEDTAVYYCAKWGPFQDAFDIWGQGTMVTVSS

SEQ ID NO: 569 - protein, 278 aa, Artificial Sequence
  source: /note="Description of Artificial Sequence: Synthetic scFv sequence"
DVVMTQSPPSLSVTPGEPASITCRSSQSLLERNAYNYLDWYLQRPGQSPQLLIYLGSNRAAGVPDRFSGSGSGRDFTLKISRVEPEDVGVYYCMQALQAPFTFGGGTKVEIKRSRGGGGSGGGGSGGGGSLEMAEVQLVQSGGGLVQPGGSLRLSCAASGFTFSSYAMSWVRQAPGKGLEWVSAISGSGGSTYYADSVKGRFTISRDNSKNTLYLQMNSLRAEDTAVYYCAKWGPFQDAFDIWGQGTMVTVSSTSGQAGQHHHHHHGAYPYDVPDYAS

SEQ ID NO: 570 - protein, 254 aa, Artificial Sequence
  source: /note="Description of Artificial Sequence: Synthetic scFv sequence"
LPVLTQPPSASATPGQRVTISCSGTTSNIGSNTVHWYQQLPGTAPKLLIYNNNQRPSGVPDRFSGSKSGTSASLAISGLRSEDEATYSCATWDDSLSGVVFGGGTKLTVLGSRGGGGSGGGGSGGGGSLEMAEVQLVQSGAEVKKPGSSVKVSCKASGGTFSSYAISWVRQAPGQGLEWMGGIIPIFGTANYAQKFQGRVTITADESTSTAYMELSSLRSEDTAVYYCARDPAYGDYEYDAFDRGQGTMVTVSS

SEQ ID NO: 571 - protein, 280 aa, Artificial Sequence
  source: /note="Description of Artificial Sequence: Synthetic scFv sequence"
LPVLTQPPSASATPGQRVTISCSGTTSNIGSNTVHWYQQLPGTAPKLLIYNNNQRPSGVPDRFSGSKSGTSASLAISGLRSEDEATYSCATWDDSLSGVVFGGGTKLTVLGSRGGGGSGGGGSGGGGSLEMAEVQLVQSGAEVKKPGSSVKVSCKASGGTFSSYAISWVRQAPGQGLEWMGGIIPIFGTANYAQKFQGRVTITADESTSTAYMELSSLRSEDTAVYYCARDPAYGDYEYDAFDRVGQGTMVTVSSTSGQAGQHHHHHHGAYPYDVPDYAS

SEQ ID NO: 572 - protein, 251 aa, Artificial Sequence
  source: /note="Description of Artificial Sequence: Synthetic scFv sequence"
LPVLTQPPSASGTPGQRVTISCSGSSSNVGSYTVNWYRQLPGTAPTLLIYNNNQRPSGVPDRFSDSKSGTSASLTISGLQPEDEADYYCAAWDDRLGGYVFGTGTKVTVLGSRGGGGSGGGGSGGGGSLEMAEVQLVQSGAEVKKPGESLKISCKGSGYSFTNYWIGWVRQMPGKGLEWMGIIYPGDSDTRYSPSFQGQVTISADKSISTAYLQWSSLKASDTAMYYCARSTGSSHMSDEWGQGTLVTVSS

SEQ ID NO: 573 - protein, 276 aa, Artificial Sequence
  source: /note="Description of Artificial Sequence: Synthetic scFv sequence"
LPVLTQPPSASGTPGQRVTISCSGSSSNVGSYTVNWYRQLPGTAPTLLIYNNNQRPSGVPDRFSDSKSGTSASLTISGLQPEDEADYYCAAWDDRLGGYVFGTGTKVTVLGSRGGGGSGGGGSGGGGSLEMAEVQLVQSGAEVKKPGESLKISCKGSGYSFTNYWIGWVRQMPGKGLEWMGIIYPGDSDTRYSPSFQGQVTISADKSISTAYLQWSSLKASDTAMYYCARSTGSSHMSDEWGQGTLVTVSSTSGQAGQHHHHHHGAYPYDVPDYAS

SEQ ID NO: 574 - protein, 264 aa, Artificial Sequence
  source: /note="Description of Artificial Sequence: Synthetic scFv sequence"
LPVLTQPPSASGTPGQRVTISCSGTSSNIGSNSVDWYQQLPGTAPKLLIYSNNQRPSGVPDRISGSKSGTSASLAISGLQSEDEADYYCAAWDDSLNGYVFGTGTKVTVLGSRGGGGSGGGGSGGGGSLEMAEVQLVQSGAEVKKPGASVKVSCKASGYTFTGYYMHWVRQAPGQGLEWMGWINPNSGGTNYAQKFQGRVTMTRDTSISTAYMELSRLRSDDTAVYYCARDYGYYGSGSYSSGPLYYYYGMDVWGQGTTVTVSS

SEQ ID NO: 575 - protein, 289 aa, Artificial Sequence
  source: /note="Description of Artificial Sequence: Synthetic scFv sequence"
LPVLTQPPSASGTPGQRVTISCSGTSSNIGSNSVDWYQQLPGTAPKLLIYSNNQRPSGVPDRISGSKSGTSASLAISGLQSEDEADYYCAAWDDSLNGYVFGTGTKVTVLGSRGGGGSGGGGSGGGGSLEMAEVQLVQSGAEVKKPGASVKVSCKASGYTFTGYYMHWVRQAPGQGLEWMGWINPNSGGTNYAQKFQGRVTMTRDTSISTAYMELSRLRSDDTAVYYCARDYGYYGSGSYSSGPLYYYYGMDVWGQGTTVTVSSTSGQAGQHHHHHHGAYPYDVPDYAS

SEQ ID NO: 576 - protein, 249 aa, Artificial Sequence
  source: /note="Description of Artificial Sequence: Synthetic scFv sequence"
LPVLTQPPSVSVAPGKTARITCGGNNIGSKSVHWYQQKPGQAPVLVVYADSDRPSGIPERFSGSNSGNTATLTISRVEAGDEADYYCQVWDSSSYHNYVFGTGTKVTVLGSRGGGGSGGGGSGGGGSLEMAEVQLVQSGAEVKKPGASVKVSCKASGYTFTSYGISWVRQAPGQGLEWMGWISAYNGNTNYAQKLQGRVTMTTDTSTSTAYMELSSLRSEDTAMYYCARYWGFGVSDRWGQGTLVTVSS

SEQ ID NO: 577 - protein, 274 aa, Artificial Sequence
  source: /note="Description of Artificial Sequence: Synthetic scFv sequence"
LPVLTQPPSVSVAPGKTARITCGGNNIGSKSVHWYQQKPGQAPVLVVYADSDRPSGIPERFSGSNSGNTATLTISRVEAGDEADYYCQVWDSSSYHNYVFGTGTKVTVLGSRGGGGSGGGGSGGGGSLEMAEVQLVQSGAEVKKPGASVKVSCKASGYTFTSYGISWVRQAPGQGLEWMGWISAYNGNTNYAQKLQGRVTMTTDTSTSTAYMELSSLRSEDTAMYYCARYWGFGVSDRWGQGTLVTVSSTSGQAGQHHHHHHGAYPYDVPDYAS

SEQ ID NO: 578 - protein, 250 aa, Artificial Sequence
  source: /note="Description of Artificial Sequence: Synthetic scFv sequence"
LPVLTQPPSVSVSPGQTAIITCSGDKLGEKYVSWYQQKPGQSPVLVIDQDTRRPSGIPERFSGSNSGTTATLTISGTQAMDEADYYCQAWDRGVVFGGGTKLTVLGSRGGGGSGGGGSGGGGSLEMAEVQLVESGGDLVQPGRSLRLSCAASGFTFNDYAMHWVRQAPGKGLEWVSGISWSGNNIGYADSVKGRFTISRDNAKNSLYLQMNSLRAEDTALYYCAKDSIRYGITWGGFDYWGQGTLVTVSS

SEQ ID NO: 579 - protein, 275 aa, Artificial Sequence
  source: /note="Description of Artificial Sequence: Synthetic scFv sequence"
LPVLTQPPSVSVSPGQTAIITCSGDKLGEKYVSWYQQKPGQSPVLVIDQDTRRPSGIPERFSGSNSGTTATLTISGTQAMDEADYYCQAWDRGVVFGGGTKLTVLGSRGGGGSGGGGSGGGGSLEMAEVQLVESGGDLVQPGRSLRLSCAASGFTFNDYAMHWVRQAPGKGLEWVSGISWSGNNIGYADSVKGRFTISRDNAKNSLYLQMNSLRAEDTALYYCAKDSIRYGITWGGFDYWGQGTLVTVSSTSGQAGQHHHHHHGAYPYDVPDYAS

SEQ ID NO: 580 - protein, 251 aa, Artificial Sequence
  source: /note="Description of Artificial Sequence: Synthetic scFv sequence"
NFMLTQPHAVSESPGKTVTISCTRSSGSIASNYVQWYQQRPGSSPRTVIYEDNQRPSGVPGRFSGSIDSSSNSASLTISGLKTEDEADYYCQSYDSTSVLFGGGTKLTVLGSRGGGGSGGGGSGGGGSLEMAEVQLVQSGAEVKKPGSSVKVSCKASGGTFSSNSLSWVRQAPGQGLEWMGRIFPILGITNYAQKFQGRVTITADKSTSTAYMELSSLRSEDTAVYYCARGNYQWYDAFDVGQGTMVTVSS

SEQ ID NO: 581 - protein, 276 aa, Artificial Sequence
  source: /note="Description of Artificial Sequence: Synthetic scFv sequence"
NFMLTQPHAVSESPGKTVTISCTRSSGSIASNYVQWYQQRPGSSPRTVIYEDNQRPSGVPGRFSGSIDSSSNSASLTISGLKTEDEADYYCQSYDSTSVLFGGGTKLTVLGSRGGGGSGGGGSGGGGSLEMAEVQLVQSGAEVKKPGSSVKVSCKASGGTFSSNSLSWVRQAPGQGLEWMGRIFPILGITNYAQKFQGRVTITADKSTSTAYMELSSLRSEDTAVYYCARGNYQWYDAFDVGQGTMVTVSSTSGQAGQHHHHHHGAYPYDVPDYAS

SEQ ID NO: 582 - protein, 254 aa, Artificial Sequence
  source: /note="Description of Artificial Sequence: Synthetic scFv sequence"
NFMLTQPHSVSESPGKTVTISCTGSSDSIANNYVQWYQQRPGSAPTNVIYEDVQRPSGVPDRFSGSIDSSSNSASLTISGLKTEDEAVYYCQSYHSDNRWVFGGGTKLTVLGSRGGGGSGGGGSGGGGSLEMAQVQLVESGGGLVQPGGSLRLSCAASGFTFSSYAMSWVRQAPGKGLEWVSAISGSGGSTYYADSVKGRFTISRDNSKNTLYLQMNSLRAEDTAVYYCARSGAYWDYSVYDEWGQGTLVTVSS

SEQ ID NO: 583 - protein, 279 aa, Artificial Sequence
  source: /note="Description of Artificial Sequence: Synthetic scFv sequence"
NFMLTQPHSVSESPGKTVTISCTGSSDSIANNYVQWYQQRPGSAPTNVIYEDVQRPSGVPDRFSGSIDSSSNSASLTISGLKTEDEAVYYCQSYHSDNRWVFGGGTKLTVLGSRGGGGSGGGGSGGGGSLEMAQVQLVESGGGLVQPGGSLRLSCAASGFTFSSYAMSWVRQAPGKGLEWVSAISGSGGSTYYADSVKGRFTISRDNSKNTLYLQMNSLRAEDTAVYYCARSGAYWDYSVYDEWGQGTLVTVSSTSGQAGQHHHHHHGAYPYDVPDYAS

SEQ ID NO: 584 - protein, 248 aa, Artificial Sequence
  source: /note="Description of Artificial Sequence: Synthetic scFv sequence"
NFMLTQPHSVSESPGKTVTISCTGSSGSIASNYVQWYQQRPGSAPTTVIYEDNQRPSGVPDRFSGSIDSSSNSASLTISGLKTEDEADYYCQSYDSSNHWVFGGGTKLTVLGSRGGGGSGGGGSGGGGSLEMAQVQLQQWGAGLLKPSETLSLTCAVYGGSFSGYYWSWIRQPPGKGLEWIGEITHSGRSNYNPSLKSRVTISVDTSKNQFSLKLSSVTAADTAVYYCARSSIMSDYWGQGTLVTVSS

SEQ ID NO: 585 - protein, 273 aa, Artificial Sequence
  source: /note="Description of Artificial Sequence: Synthetic scFv sequence"
NFMLTQPHSVSESPGKTVTISCTGSSGSIASNYVQWYQQRPGSAPTTVIYEDNQRPSGVPDRFSGSIDSSSNSASLTISGLKTEDEADYYCQSYDSSNHWVFGGGTKLTVLGSRGGGGSGGGGSGGGGSLEMAQVQLQQWGAGLLKPSETLSLTCAVYGGSFSGYYWSWIRQPPGKGLEWIGEITHSGRSNYNPSLKSRVTISVDTSKNQFSLKLSSVTAADTAVYYCARSSIMSDYWGQGTLVTVSSTSGQAGQHHHHHHGAYPYDVPDYAS

SEQ ID NO: 586 - protein, 250 aa, Artificial Sequence
  source: /note="Description of Artificial Sequence: Synthetic scFv sequence"
NFMLTQPHSVSESPGKTVTISCTGSSGSIASNYVQWYQQRPGSAPTTVIYEDNQRPSGVPDRFSGSIDSSSNSASLTISGLKTEDEADYYCQSYDSSNLWVFGGGTKLTVLGSRGGGGSGGGGSGGGGSLEMAQMQLVQSGAEVKKPGSSVKVSCKASGGTFSSYAISWVRQAPGQGLEWMGGIIPIFGTANYAQKFQGRVTITADESTSTAYMELSSLRSEDTAVYYCARYNYYYYDSWGQGTLVTVSS

SEQ ID NO: 587 - protein, 275 aa, Artificial Sequence
  source: /note="Description of Artificial Sequence: Synthetic scFv sequence"
NFMLTQPHSVSESPGKTVTISCTGSSGSIASNYVQWYQQRPGSAPTTVIYEDNQRPSGVPDRFSGSIDSSSNSASLTISGLKTEDEADYYCQSYDSSNLWVFGGGTKLTVLGSRGGGGSGGGGSGGGGSLEMAQMQLVQSGAEVKKPGSSVKVSCKASGGTFSSYAISWVRQAPGQGLEWMGGIIPIFGTANYAQKFQGRVTITADESTSTAYMELSSLRSEDTAVYYCARYNYYYYDSWGQGTLVTVSSTSGQAGQHHHHHHGAYPYDVPDYAS

SEQ ID NO: 588 - protein, 249 aa, Artificial Sequence
  source: /note="Description of Artificial Sequence: Synthetic scFv sequence"
NFMLTQPHSVSESPGKTVTISCTGSSGSIASNYVQWYQQRPGSAPTTVIYEDNQRPSGVPDRFSGSIDSSSNSASLTISGLKTEDEADYYCQSYDSSNWVFGGGTKLTVLGSRGGGGSGGGGSGGGGSLEMAEVQLVQSGAEVKKPGSSVKVSCKASGGTFSSYAISWVRQAPGQGLEWMGGIIPIFGTANYAQKFQGRVTITADESTSTAYMELSSLRSEDTAVYYCARNNHYYNDYWGQGTLVTVSS

SEQ ID NO: 589 - protein, 274 aa, Artificial Sequence
  source: /note="Description of Artificial Sequence: Synthetic scFv sequence"
NFMLTQPHSVSESPGKTVTISCTGSSGSIASNYVQWYQQRPGSAPTTVIYEDNQRPSGVPDRFSGSIDSSSNSASLTISGLKTEDEADYYCQSYDSSNWVFGGGTKLTVLGSRGGGGSGGGGSGGGGSLEMAEVQLVQSGAEVKKPGSSVKVSCKASGGTFSSYAISWVRQAPGQGLEWMGGIIPIFGTANYAQKFQGRVTITADESTSTAYMELSSLRSEDTAVYYCARNNHYYNDYWGQGTLVTVSSTSGQAGQHHHHHHGAYPYDVPDYAS

SEQ ID NO: 590 - protein, 248 aa, Artificial Sequence
  source: /note="Description of Artificial Sequence: Synthetic scFv sequence"
NFMLTQPHSVSESPGKTVTISCTRSSGSIASNFVQWYQQRPGSAPTPMIYEDNNRPPGVPDRFSASVDSSSNSASLTISGLKTEDEADYYCQSYDTSNVVFGGGTKLTVLGSRGGGGSGGGGSGGGGSLEMAEVQLVESGGGLVQPGGSLRLSCAASGFTFSSYEMNWVRQAPGKGLEWVSYISSSGSTIYYADSVKGRFTISRDNAKNSLYLQMNSLRAEDTAVYYCARWDYGMDVWGQGTTVTVSS

SEQ ID NO: 591 - protein, 273 aa, Artificial Sequence
  source: /note="Description of Artificial Sequence: Synthetic scFv sequence"
NFMLTQPHSVSESPGKTVTISCTRSSGSIASNFVQWYQQRPGSAPTPMIYEDNNRPPGVPDRFSASVDSSSNSASLTISGLKTEDEADYYCQSYDTSNVVFGGGTKLTVLGSRGGGGSGGGGSGGGGSLEMAEVQLVESGGGLVQPGGSLRLSCAASGFTFSSYEMNWVRQAPGKGLEWVSYISSSGSTIYYADSVKGRFTISRDNAKNSLYLQMNSLRAEDTAVYYCARWDYGMDVWGQGTTVTVSSTSGQAGQHHHHHHGAYPYDVPDYAS

SEQ ID NO: 592 - protein, 249 aa, Artificial Sequence
  source: /note="Description of Artificial Sequence: Synthetic scFv sequence"
NFMLTQPHSVSESPGKTVTISCTRSSGSIASNYVQWYQQRPGSAPTTVIYEDNQRPSGVPDRFSGSIDSSSNSASLTISGLKTEDEADYYCQSYDSSNSVVFGGGTKLTVLGSRGGGGSGGGGSGGGGSLEMAQVQLVQSGTEVKKPGASVRVACKASGYPFNKYDINWVRQAPGQGLEWMGGIIPIFRTTNYAQKFQGRVTITADESTSTAYMELSSLRSEDTAVYYCAREWFYWDIWGQGTLVTVSS

SEQ ID NO: 593 - protein, 274 aa, Artificial Sequence
  source: /note="Description of Artificial Sequence: Synthetic scFv sequence"
NFMLTQPHSVSESPGKTVTISCTRSSGSIASNYVQWYQQRPGSAPTTVIYEDNQRPSGVPDRFSGSIDSSSNSASLTISGLKTEDEADYYCQSYDSSNSVVFGGGTKLTVLGSRGGGGSGGGGSGGGGSLEMAQVQLVQSGTEVKKPGASVRVACKASGYPFNKYDINWVRQAPGQGLEWMGGIIPIFRTTNYAQKFQGRVTITADESTSTAYMELSSLRSEDTAVYYCAREWFYWDIWGQGTLVTVSSTSGQAGQHHHHHHGAYPYDVPDYAS

SEQ ID NO: 594 - protein, 265 aa, Artificial Sequence
  source: /note="Description of Artificial Sequence: Synthetic scFv sequence"
NFMLTQPHSVSESPGKTVTISCTRSSGSIASNYVQWYQQRPGSAPTTVIYEDNQRPSGVPDRFSGSIDSSSNSASLTISGLKTEDEADYYCQSYDSSNSWVFGGGTKLTVLGSRGGGGSGGGGSGGGGSLEMAQVQLVQSGAEVKRPGSSVKVSCTASGGTFSSDAISWVRQAPGQGLEWMGGIIPMFGTANYAQKFQGRVTITADESTSTAYMELSSLRSEDTAVYYCAREGYYYPSAYLGSVLNDISSVYDEWGQGTLVTVSS

SEQ ID NO: 595 - protein, 290 aa, Artificial Sequence
  source: /note="Description of Artificial Sequence: Synthetic scFv sequence"
NFMLTQPHSVSESPGKTVTISCTRSSGSIASNYVQWYQQRPGSAPTTVIYEDNQRPSGVPDRFSGSIDSSSNSASLTISGLKTEDEADYYCQSYDSSNSWVFGGGTKLTVLGSRGGGGSGGGGSGGGGSLEMAQVQLVQSGAEVKRPGSSVKVSCTASGGTFSSDAISWVRQAPGQGLEWMGGIIPMFGTANYAQKFQGRVTITADESTSTAYMELSSLRSEDTAVYYCAREGYYYPSAYLGSVLNDISSVYDEWGQGTLVTVSSTSGQAGQHHHHHHGAYPYDVPDYAS

SEQ ID NO: 596 - protein, 273 aa, Artificial Sequence
  source: /note="Description of Artificial Sequence: Synthetic scFv sequence"
NFMLTQPHSVSESPGKTVTISCTRSSGSIASNYVQWYQQRPGSAPTTVIYEDNQRPSGVPDRFSGSIDSSSNSASLTISGLKTEDEADYYCQSYDSSNVVFGGGTKVTVLGSRGGGGSGGGGSGGGGSLEMAEVQLVESGGGLVQPGGSLRLSCAASGFTFSSYEMNWVRQAPGKGLEWVSYISSSGSTIYYADSVKGRFTISRDNAKNSLYLQMNSLRAEDTAVYYCARWDYGMDVWGQGTTVTVSSTSGQAGQHHHHHHGAYPYDVPDYAS

SEQ ID NO: 597 - protein, 249 aa, Artificial Sequence
  source: /note="Description of Artificial Sequence: Synthetic scFv sequence"
NFMLTQPHSVSESPGKTVTISCTRSSGSIASNYVQWYQQRPGSAPTTVIYEDNQRPSGVPDRFSGSIDSSSNSASLTISGLKTEDEADYYCQSYDSTNWVFGGGTKLTVLGSRGGGGSGGGGSGGGGSLEMAQVQLVQSGAEVKKPGSSVKVSCKASGGTFSSYAISWVRQAPGQGLEWMGGIIPIFGTANYAQKFQGRVTITADESTSTAYMELSSLRSEDTAVYYCARYNYYFNDYWGQGTLVTVSS

SEQ ID NO: 598 - protein, 274 aa, Artificial Sequence
  source: /note="Description of Artificial Sequence: Synthetic scFv sequence"
NFMLTQPHSVSESPGKTVTISCTRSSGSIASNYVQWYQQRPGSAPTTVIYEDNQRPSGVPDRFSGSIDSSSNSASLTISGLKTEDEADYYCQSYDSTNWVFGGGTKLTVLGSRGGGGSGGGGSGGGGSLEMAQVQLVQSGAEVKKPGSSVKVSCKASGGTFSSYAISWVRQAPGQGLEWMGGIIPIFGTANYAQKFQGRVTITADESTSTAYMELSSLRSEDTAVYYCARYNYYFNDYWGQGTLVTVSSTSGQAGQHHHHHHGAYPYDVPDYAS

SEQ ID NO: 599 - protein, 249 aa, Artificial Sequence
  source: /note="Description of Artificial Sequence: Synthetic scFv sequence"
NFMLTQPHSVSESPGKTVTISCTRSSGSIASNYVQWYQQRPGSSPTTVIYEDNQRPSGVPDRFSGSIDSSSNSASLTISGLKTEDEADYYCQSYDSSNWVFGGGTKLTVLGSRGGGGSGGGGSGGGGSLEMAEVQLVQSGAEVKKPGSSVKVSCKASGGTFSSYAISWVRQAPGQGLEWMGGIIPIFGTANYAQKFQGRVTITADESTSTAYMELSSLRSEDTAVYYCARSNYYYNDYWGQGTLVTVSS

SEQ ID NO: 600 - protein, 274 aa, Artificial Sequence
  source: /note="Description of Artificial Sequence: Synthetic scFv sequence"
NFMLTQPHSVSESPGKTVTISCTRSSGSIASNYVQWYQQRPGSSPTTVIYEDNQRPSGVPDRFSGSIDSSSNSASLTISGLKTEDEADYYCQSYDSSNWVFGGGTKLTVLGSRGGGGSGGGGSGGGGSLEMAEVQLVQSGAEVKKPGSSVKVSCKASGGTFSSYAISWVRQAPGQGLEWMGGIIPIFGTANYAQKFQGRVTITADESTSTAYMELSSLRSEDTAVYYCARSNYYYNDYWGQGTLVTVSSTSGQAGQHHHHHHGAYPYDVPDYAS

SEQ ID NO: 601 - protein, 249 aa, Artificial Sequence
  source: /note="Description of Artificial Sequence: Synthetic scFv sequence"
NFMLTQPHSVSGSPGKTVTISCTGSSGSIADNFVQWYQQRPGGVPTTVIFNDDERPSGVPDRFSGSIDTSSNSASLTISGLKTEDEADYYCQSYDNNNRGVFGGGTKLTVLGSRGGGGSGGGGSGGGGSLEMAQVQLVQSGAEVKKPGSSVKVSCKASGGTFSSYAISWVRQAPGQGLEWMGWMNPNSGNTGYAQKFQGRVTMTRNTSISTAYMELSNLRSEDTAVYYCARYYSYGYDWGQGTLVTVSS

SEQ ID NO: 602 - protein, 274 aa, Artificial Sequence
  source: /note="Description of Artificial Sequence: Synthetic scFv sequence"
NFMLTQPHSVSGSPGKTVTISCTGSSGSIADNFVQWYQQRPGGVPTTVIFNDDERPSGVPDRFSGSIDTSSNSASLTISGLKTEDEADYYCQSYDNNNRGVFGGGTKLTVLGSRGGGGSGGGGSGGGGSLEMAQVQLVQSGAEVKKPGSSVKVSCKASGGTFSSYAISWVRQAPGQGLEWMGWMNPNSGNTGYAQKFQGRVTMTRNTSISTAYMELSNLRSEDTAVYYCARYYSYGYDWGQGTLVTVSSTSGQAGQHHHHHHGAYPYDVPDYAS

SEQ ID NO: 603 - protein, 256 aa, Artificial Sequence
  source: /note="Description of Artificial Sequence: Synthetic scFv sequence"
QAVLTQPASVSGSPGQSITISCTGTSSDVGGYNYVSWYQQHPGKAPKLMIYEVSNRPSGVSNRFSGSKSGNTASLTISGLQAEDEADYYCSSYTSSSTPYVFGAGTKVTVLGSRGGGGSGGGGSGGGGSLEMAEVQLVESGGGLVQPGRSLRLSCAASGFTFDDYAMHWVRQAPGKGLEWVSGISWNSGSIGYADSVKGRFTISRDNAKNSLYLQMNSLRAEDTALYYCAKARWTAVASDHHFDYWGQGTLVTVSS

SEQ ID NO: 604 - protein, 281 aa, Artificial Sequence
  source: /note="Description of Artificial Sequence: Synthetic scFv sequence"
QAVLTQPASVSGSPGQSITISCTGTSSDVGGYNYVSWYQQHPGKAPKLMIYEVSNRPSGVSNRFSGSKSGNTASLTISGLQAEDEADYYCSSYTSSSTPYVFGAGTKVTVLGSRGGGGSGGGGSGGGGSLEMAEVQLVESGGGLVQPGRSLRLSCAASGFTFDDYAMHWVRQAPGKGLEWVSGISWNSGSIGYADSVKGRFTISRDNAKNSLYLQMNSLRAEDTALYYCAKARWTAVASDHHFDYWGQGTLVTVSSTSGQAGQHHHHHHGAYPYDVPDYAS

SEQ ID NO: 605 - protein, 257 aa, Artificial Sequence
  source: /note="Description of Artificial Sequence: Synthetic scFv sequence"
QAVLTQPHSVSESPGKTVTISCTRSSGSIASNYVQWYQQRPGSAPTTVIYEDNQRPSGVPDRFSGSIDSSSNSASLTISGLKTEDEADYYCQSYDSTITVFGGGTKLTVLGSRGGGGSGGGGSGGGGSLEMAQVQLVQSGAEVKKPGSSVKVSCKASGGTFSSYAISWVRQAPGQGLEWMGGIIPIFGTANYAQKFQGRVTITADESTSTAYMELSSLRSEDTAVYYCAGEGYYDSSGYSNGDAFDRGQGTMVTVSS

SEQ ID NO: 606 - protein, 283 aa, Artificial Sequence
  source: /note="Description of Artificial Sequence: Synthetic scFv sequence"
QAVLTQPHSVSESPGKTVTISCTRSSGSIASNYVQWYQQRPGSAPTTVIYEDNQRPSGVPDRFSGSIDSSSNSASLTISGLKTEDEADYYCQSYDSTITVFGGGTKLTVLGSRGGGGSGGGGSGGGGSLEMAQVQLVQSGAEVKKPGSSVKVSCKASGGTFSSYAISWVRQAPGQGLEWMGGIIPIFGTANYAQKFQGRVTITADESTSTAYMELSSLRSEDTAVYYCAGEGYYDSSGYSNGDAFDRVGQGTMVTVSSTSGQAGQHHHHHHGAYPYDVPDYAS

SEQ ID NO: 607 - protein, 247 aa, Artificial Sequence
  source: /note="Description of Artificial Sequence: Synthetic scFv sequence"
QAVLTQPPSASETPGQRVTISCSGSRSNIGTNIVHWYQQRPGMAPKLLTYGSRRPSGVPDRFSGSKFGTSASLAISGLQSEDEADYYCAAWDDSLNGPAFGGGTKLTVLGSRGGGGSGGGGSGGGGSLEMAQVQLQQWGAGLLKPSETLSLTCAVYGGSFSGYYWSWIRQPPGKGLEWIGEINHSGSTNYNPSLKSRVTISVDTSKNQFSLKLSSVTAADTAVYYCARDGGGYFDYWGQGTLVTVSS

SEQ ID NO: 608 - protein, 272 aa, Artificial Sequence
  source: /note="Description of Artificial Sequence: Synthetic scFv sequence"
QAVLTQPPSASETPGQRVTISCSGSRSNIGTNIVHWYQQRPGMAPKLLTYGSRRPSGVPDRFSGSKFGTSASLAISGLQSEDEADYYCAAWDDSLNGPAFGGGTKLTVLGSRGGGGSGGGGSGGGGSLEMAQVQLQQWGAGLLKPSETLSLTCAVYGGSFSGYYWSWIRQPPGKGLEWIGEINHSGSTNYNPSLKSRVTISVDTSKNQFSLKLSSVTAADTAVYYCARDGGGYFDYWGQGTLVTVSSTSGQAGQHHHHHHGAYPYDVPDYAS

SEQ ID NO: 609 - protein, 253 aa, Artificial Sequence
  source: /note="Description of Artificial Sequence: Synthetic scFv sequence"
QAVLTQPPSASGAPGQRVTVSCSGSNSNIGSNYVNWYQQFPGTAPKLLMYSSSQRPSGVPDRFSGSKSGTSASLAISGLHSEDEADYYCATWDDSLNAWVFGGGTKLTVLGSRGGGGSGGGGSGGGGSLEMAEVQLVQSGAEVRKPGASVKVSCKTSGYTFTWYAIHWVRQAPGQRLEWMGWINAGSGNTKYSQKFQGRVTLTRDTSASTAYMELSSLRSDDTAVYYCARPNNYGSGGDVFDRGQGTMVTVSS

SEQ ID NO: 610 - protein, 278 aa, Artificial Sequence
  source: /note="Description of Artificial Sequence: Synthetic scFv sequence"
QAVLTQPPSASGAPGQRVTVSCSGSNSNIGSNYVNWYQQFPGTAPKLLMYSSSQRPSGVPDRFSGSKSGTSASLAISGLHSEDEADYYCATWDDSLNAWVFGGGTKLTVLGSRGGGGSGGGGSGGGGSLEMAEVQLVQSGAEVRKPGASVKVSCKTSGYTFTWYAIHWVRQAPGQRLEWMGWINAGSGNTKYSQKFQGRVTLTRDTSASTAYMELSSLRSDDTAVYYCARPNNYGSGGDVFDRGQGTMVTVSSTSGQAGQHHHHHHGAYPYDVPDYAS

SEQ ID NO: 611 - protein, 248 aa, Artificial Sequence
  source: /note="Description of Artificial Sequence: Synthetic scFv sequence"
QAVLTQPPSASGTPGQRVTISCSGSSSNIGSNTVNWYQQLPGTAPKLLIYSNNQRPSGVPDRFSGSKSGTSASLAISGLQSEDEADYYCAAWDDSLNGYVFGTGTKLTVLGSRGGGGSGGGGSGGGGSLEMAEVQLVQSGAEVKKPGSSVKVSCKASGGTFSSYAISWVRQAPGQGLEWMGGIIPIFGTANYAQKFQGRVTITADESTSTAYMELSSLRSEDTAVYYCARDWDYMDVWGKGTTVTVSS

SEQ ID NO: 612 - protein, 273 aa, Artificial Sequence
  source: /note="Description of Artificial Sequence: Synthetic scFv sequence"
QAVLTQPPSASGTPGQRVTISCSGSSSNIGSNTVNWYQQLPGTAPKLLIYSNNQRPSGVPDRFSGSKSGTSASLAISGLQSEDEADYYCAAWDDSLNGYVFGTGTKLTVLGSRGGGGSGGGGSGGGGSLEMAEVQLVQSGAEVKKPGSSVKVSCKASGGTFSSYAISWVRQAPGQGLEWMGGIIPIFGTANYAQKFQGRVTITADESTSTAYMELSSLRSEDTAVYYCARDWDYMDVWGKGTTVTVSSTSGQAGQHHHHHHGAYPYDVPDYAS

SEQ ID NO: 613 - protein, 248 aa, Artificial Sequence
  source: /note="Description of Artificial Sequence: Synthetic scFv sequence"
QAVLTQPPSASGTPGQRVTISCSGSSSNIGSNTVNWYQQLPGTAPKLLIYSNNQRPSGVPDRFSGSKSGTSASLAISGLQSEDETDYYCAAWDDSLNGYVFGTGTKVTVLGSRGGGGSGGGGSGGGGSLEMAQVQLQQWGAGLLKPSETLSLTCAVYGGSFSGYYWSWIRQPPGKGLEWIGEINHSGSTNYNPSLKSRVTISVDTSKNQFSLKLSSVTAADTAVYYCAREGLDAFDIWGQGTMVTVSS

SEQ ID NO: 614 - protein, 273 aa, Artificial Sequence
  source: /note="Description of Artificial Sequence: Synthetic scFv sequence"
QAVLTQPPSASGTPGQRVTISCSGSSSNIGSNTVNWYQQLPGTAPKLLIYSNNQRPSGVPDRFSGSKSGTSASLAISGLQSEDETDYYCAAWDDSLNGYVFGTGTKVTVLGSRGGGGSGGGGSGGGGSLEMAQVQLQQWGAGLLKPSETLSLTCAVYGGSFSGYYWSWIRQPPGKGLEWIGEINHSGSTNYNPSLKSRVTISVDTSKNQFSLKLSSVTAADTAVYYCAREGLDAFDIWGQGTMVTVSSTSGQAGQHHHHHHGAYPYDVPDYAS

SEQ ID NO: 615 - protein, 259 aa, Artificial Sequence
  source: /note="Description of Artificial Sequence: Synthetic scFv sequence"
QAVLTQPPSASGTPGQRVTISCSGSSSNIGSNTVNWYQQLPGTAPKLLMYNNDQRPSGVPDRFSGSKSGTSASLAISGLQSEDEADYYCAAWDDSLNGYVFGPGTKVTVLGSRGGGGSGGGGSGGGGSLEMAQVQLVESGAEVKKPGASVKVSCKASGYTFTSYGISWVRQAPGQGLEWMGWISAYNGNTNYAQKLQGRVTMTTDTSTSTAYMELRSLRSDDTAVYYCARDLSRGANPHYYYYYGMDVWGQGTTVTVSS

SEQ ID NO: 616 - protein, 284 aa, Artificial Sequence
  source: /note="Description of Artificial Sequence: Synthetic scFv sequence"
QAVLTQPPSASGTPGQRVTISCSGSSSNIGSNTVNWYQQLPGTAPKLLMYNNDQRPSGVPDRFSGSKSGTSASLAISGLQSEDEADYYCAAWDDSLNGYVFGPGTKVTVLGSRGGGGSGGGGSGGGGSLEMAQVQLVESGAEVKKPGASVKVSCKASGYTFTSYGISWVRQAPGQGLEWMGWISAYNGNTNYAQKLQGRVTMTTDTSTSTAYMELRSLRSDDTAVYYCARDLSRGANPHYYYYYGMDVWGQGTTVTVSSTSGQAGQHHHHHHGAYPYDVPDYAS

SEQ ID NO: 617 - protein, 247 aa, Artificial Sequence
  source: /note="Description of Artificial Sequence: Synthetic scFv sequence"
QAVLTQPPSASGTPGQRVTISCSGSSSNIGSNTVNWYQQLPGTAPKLLMYSNDQRPSGVPDRFSGSKSGTSASLAISGLQSEDEADYYCAAWDDSLNGYVFAAGTQLTVLSSRGGGGSGGGGSGGGGSLEMAQVQLQQWGAGLLKPSETLSLTCAVYGGSFSGYYWSWIRQPPGKGLEWIGEINHSGSTNYNPSLKSRVTISVDTSKNQFSLKLSSVTAADTAVYYCAREGLDAFDRGQGTMVTVSS

SEQ ID NO: 618 - protein, 273 aa, Artificial Sequence
  source: /note="Description of Artificial Sequence: Synthetic scFv sequence"
QAVLTQPPSASGTPGQRVTISCSGSSSNIGSNTVNWYQQLPGTAPKLLMYSNDQRPSGVPDRFSGSKSGTSASLAISGLQSEDEADYYCAAWDDSLNGYVFAAGTQLTVLSSRGGGGSGGGGSGGGGSLEMAQVQLQQWGAGLLKPSETLSLTCAVYGGSFSGYYWSWIRQPPGKGLEWIGEINHSGSTNYNPSLKSRVTISVDTSKNQFSLKLSSVTAADTAVYYCAREGLDAFDRVGQGTMVTVSSTSGQAGQHHHHHHGAYPYDVPDYAS

SEQ ID NO: 619 - protein, 247 aa, Artificial Sequence
  source: /note="Description of Artificial Sequence: Synthetic scFv sequence"
QAVLTQPPSTSGTPGQRVTISCSGSSSNIGRNGVNWYQQLPGAAPKVLIYNDNQRPSGVPDRVSGSQSGSSGTLAIDGLRSEDEADYYCAAWDDSLHGVVFGGGTKLTVLGSRGGGGSGGGGSGGGGSLEMAQVQLVQSGAEVKKPGASVKVSCKVSGYTLNELSMHWVRQAPGKGLEWMGGFDPEDGETIYAQKFQGRVTMTEDTSTDTAYMELSSLRSEDTAVYYCARGGYGDSWGQGTLVTVSS

SEQ ID NO: 620 - protein, 272 aa, Artificial Sequence
  source: /note="Description of Artificial Sequence: Synthetic scFv sequence"
QAVLTQPPSTSGTPGQRVTISCSGSSSNIGRNGVNWYQQLPGAAPKVLIYNDNQRPSGVPDRVSGSQSGSSGTLAIDGLRSEDEADYYCAAWDDSLHGVVFGGGTKLTVLGSRGGGGSGGGGSGGGGSLEMAQVQLVQSGAEVKKPGASVKVSCKVSGYTLNELSMHWVRQAPGKGLEWMGGFDPEDGETIYAQKFQGRVTMTEDTSTDTAYMELSSLRSEDTAVYYCARGGYGDSWGQGTLVTVSSTSGQAGQHHHHHHGAYPYDVPDYAS

SEQ ID NO: 621 - protein, 249 aa, Artificial Sequence
  source: /note="Description of Artificial Sequence: Synthetic scFv sequence"
QAVLTQPPSVSVAPGKTARVTCGGNNIGSESVHWYQQKPGQAPVLVIYYDTDRPSGIPERFSGSHSGTTATLTISRVEAGDEADYYCQVWDSSRDHVVFGGGTKLTVLGSRGGGGSGGGGSGGGGSLEMAQVQLVQSGGGVVQPGRSLRLSCAASGFTFSSYAMHWVRQAPGKGLEWVAVISYDGSNKYYADSVKGLFTISRDNSKNTLYLQMNSLRAEDTAVYYCARSYFTSGFYDYWGQGTLVTVSS

SEQ ID NO: 622 - protein, 274 aa, Artificial Sequence
  source: /note="Description of Artificial Sequence: Synthetic scFv sequence"
QAVLTQPPSVSVAPGKTARVTCGGNNIGSESVHWYQQKPGQAPVLVIYYDTDRPSGIPERFSGSHSGTTATLTISRVEAGDEADYYCQVWDSSRDHVVFGGGTKLTVLGSRGGGGSGGGGSGGGGSLEMAQVQLVQSGGGVVQPGRSLRLSCAASGFTFSSYAMHWVRQAPGKGLEWVAVISYDGSNKYYADSVKGLFTISRDNSKNTLYLQMNSLRAEDTAVYYCARSYFTSGFYDYWGQGTLVTVSSTSGQAGQHHHHHHGAYPYDVPDYAS

SEQ ID NO: 623 - protein, 250 aa, Artificial Sequence
  source: /note="Description of Artificial Sequence: Synthetic scFv sequence"
QPVLTQPPSVSKGLRQTATLTCTGNSNNVGNLGVAWLQQHQGHPPKLLSYRNNNRPSGISERLSASRSGNTASLTITGLQPEDEADYYCSAWDSSLSAWVFGGGTKLTVLGSRGGGGSGGGGSGGGGSLEMAEVQLVESGGVVVQPGGSLRLSCAASGFTFDDYAMHWVRQAPGKGLEWVSLINWDGGSTYYADSVKGRFTISRDNSKNSLYLQMNSLRAEDTALYYCAKGMGLRAFDYWGQGTLVTVSS

SEQ ID NO: 624 - protein, 275 aa, Artificial Sequence
  source: /note="Description of Artificial Sequence: Synthetic scFv sequence"
QPVLTQPPSVSKGLRQTATLTCTGNSNNVGNLGVAWLQQHQGHPPKLLSYRNNNRPSGISERLSASRSGNTASLTITGLQPEDEADYYCSAWDSSLSAWVFGGGTKLTVLGSRGGGGSGGGGSGGGGSLEMAEVQLVESGGVVVQPGGSLRLSCAASGFTFDDYAMHWVRQAPGKGLEWVSLINWDGGSTYYADSVKGRFTISRDNSKNSLYLQMNSLRAEDTALYYCAKGMGLRAFDYWGQGTLVTVSSTSGQAGQHHHHHHGAYPYDVPDYAS

SEQ ID NO: 625 - protein, 245 aa, Artificial Sequence
  source: /note="Description of Artificial Sequence: Synthetic scFv sequence"
QPVLTQPPSVSVAPGKTATITCGGNNIGSESVHWYHQKPGQAPVLVIYDDAGRPSGIPERFTGSNSGNTATLTISRVEAGDEADYYCQVWDRNSAQFVFGPGTKVTVLGSRGGGGSGGGGSGGGGSLEMAEVQLVQSGAEVKKPGASVKVSCKASGYTFTSYGISWVRQAPGQGLEWMGWISAYNGNTNYAQKLQGRVTMTTDTSTSTAYMELRSLRSDDTAVYYCARGVHLDWWGQGTLVTVSS

SEQ ID NO: 626 - protein, 270 aa, Artificial Sequence
  source: /note="Description of Artificial Sequence: Synthetic scFv sequence"
QPVLTQPPSVSVAPGKTATITCGGNNIGSESVHWYHQKPGQAPVLVIYDDAGRPSGIPERFTGSNSGNTATLTISRVEAGDEADYYCQVWDRNSAQFVFGPGTKVTVLGSRGGGGSGGGGSGGGGSLEMAEVQLVQSGAEVKKPGASVKVSCKASGYTFTSYGISWVRQAPGQGLEWMGWISAYNGNTNYAQKLQGRVTMTTDTSTSTAYMELRSLRSDDTAVYYCARGVHLDWWGQGTLVTVSSTSGQAGQHHHHHHGAYPYDVPDYAS

SEQ ID NO: 627 - protein, 250 aa, Artificial Sequence
  source: /note="Description of Artificial Sequence: Synthetic scFv sequence"
QPVLTQPPSVSVSPGQTAAIPCSGDKLGDKFASWYQQKPGQSPVLVIYQDTKRPSGIPERFSGSNSGNTATLTISGTQAMDEADYYCQTWASGRVVFGGGTKLTVLGSRGGGGSGGGGSGGGGSLEMAQVQLQQSGPGLVKPSQTLSLTCAISGDSVSSNSAAWNWIRQSPSRGLEWLGRTYYRSKWYNDYAVSVKSRITINPDTSKNQFSLQLNSVTPEDTAVYYCARERSGWKGFDYWGQGTLVTVSS

SEQ ID NO: 628 - protein, 275 aa, Artificial Sequence
  source: /note="Description of Artificial Sequence: Synthetic scFv sequence"
QPVLTQPPSVSVSPGQTAAIPCSGDKLGDKFASWYQQKPGQSPVLVIYQDTKRPSGIPERFSGSNSGNTATLTISGTQAMDEADYYCQTWASGRVVFGGGTKLTVLGSRGGGGSGGGGSGGGGSLEMAQVQLQQSGPGLVKPSQTLSLTCAISGDSVSSNSAAWNWIRQSPSRGLEWLGRTYYRSKWYNDYAVSVKSRITINPDTSKNQFSLQLNSVTPEDTAVYYCARERSGWKGFDYWGQGTLVTVSSTSGQAGQHHHHHHGAYPYDVPDYAS

SEQ ID NO: 629 - protein, 248 aa, Artificial Sequence
  source: /note="Description of Artificial Sequence: Synthetic scFv sequence"
QPVLTQPPSVSVVPGKTARITCGGKNIGSKSVHWYQQKPGQAPVVVIHYDSDRPSGIPERFSGSNSGNTATLTISRVEAGDEADYYCQVWDSSSDHPYVFGTGTKVTVLGSRGGGGSGGGGSGGGGSLEMAQVQLVQSGAEVKKPGASVKVSCKASGYTFTNYGISWVRQAPGQGLEWMGWISAYNGNTNYAHKLQGRVTMTTDTSTSTANMELRSLRPDDTAVYYCARSYFGSHDYWGQGTLVTVSS

SEQ ID NO: 630 - protein, 273 aa, Artificial Sequence
  source: /note="Description of Artificial Sequence: Synthetic scFv sequence"
QPVLTQPPSVSVVPGKTARITCGGKNIGSKSVHWYQQKPGQAPVVVIHYDSDRPSGIPERFSGSNSGNTATLTISRVEAGDEADYYCQVWDSSSDHPYVFGTGTKVTVLGSRGGGGSGGGGSGGGGSLEMAQVQLVQSGAEVKKPGASVKVSCKASGYTFTNYGISWVRQAPGQGLEWMGWISAYNGNTNYAHKLQGRVTMTTDTSTSTANMELRSLRPDDTAVYYCARSYFGSHDYWGQGTLVTVSSTSGQAGQHHHHHHGAYPYDVPDYAS

SEQ ID NO: 631 - protein, 256 aa, Artificial Sequence
  source: /note="Description of Artificial Sequence: Synthetic scFv sequence"
QSALTQPASVSGSPGQSITISCTGTSSDIGGYNYVSWYQQHPGKAPKLMIYDVSNRPSGVSNRFSGSKSGNTASLTISGLQAEDEADYYCISYTRTWNPYVFGSGTKVTVLGSRGGGGSGGGGSGGGGSLEMAEVQLVQSGGGVVQPGGSLRLSCAASGFTFDDYAMHWVRQAPGKGLEWVSLISGDGGSTYYADSVKGRFTISRDNSKNSLYLQMNSLRTEDTALYYCAKDRAAAGYYYYGMDVWGQGTTVTVSS

SEQ ID NO: 632 - protein, 274 aa, Artificial Sequence
  source: /note="Description of Artificial Sequence: Synthetic scFv sequence"
QSALTQPASVSGSPGQSITISCTGTSSDVGGYNSVSWYQQHPGKAPRLMIYDVSNRPSGVSNRFSGSKSGNTASLTISGLQAEDEADYYCSSYTSSSTPLVFGTGTKVTVLGSRGGGGSGGGGSGGGGSLEMAQVQLVQSGAEVKKPGASVKVSCKASGYTFTSYGISWVRQAPGQGLEWMGWISAYNGNTNYAQKLQGRVTMTTDTSTSTAYMELRSLRSDDTAVYYCARGAVAYHDWGQGTLVTVSSTSGQAGQHHHHHHGAYPYDVPDYAS

SEQ ID NO: 633 - protein, 279 aa, Artificial Sequence
  source: /note="Description of Artificial Sequence: Synthetic scFv sequence"
QSALTQPASVSGSPGQSMSCTGTSSDIGGYNYVSWYQQHPGKAPKLMIYDVSNRPSGVSNRFSGSKSGNTASLTISGLQAEDEADYYCISYTRTWNPYVFGSGTKVTVLGSRGGGGSGGGGSGGGGSLEMAEVQLVQSGGGVVQPGGSLRLSCAASGFTFDDYAMHWVRQAPGKGLEWVSLISGDGGSTYYADSVKGRFTISRDNSKNSLYLQMNSLRTEDTALYYCAKDRAAAGYYYYGMDVWGQGTTVTVSSTSGQAGQHHHHHHGAYPYDVPDYAS

SEQ ID NO: 634 - protein, 272 aa, Artificial Sequence
  source: /note="Description of Artificial Sequence: Synthetic scFv sequence"
QSALTQPASVSGSPGQSMSCTGTSSDVGGYNSVSWYQQHPGKAPRLMIYDVSNRPSGVSNRFSGSKSGNTASLTISGLQAEDEADYYCSSYTSSSTPLVFGTGTKVTVLGSRGGGGSGGGGSGGGGSLEMAQVQLVQSGAEVKKPGASVKVSCKASGYTFTSYGISWVRQAPGQGLEWMGWISAYNGNTNYAQKLQGRVTMTTDTSTSTAYMELRSLRSDDTAVYYCARGAVAYHDWGQGTLVTVSSTSGQAGQHHHHHHGAYPYDVPDYAS

SEQ ID NO: 635 - protein, 276 aa, Artificial Sequence
  source: /note="Description of Artificial Sequence: Synthetic scFv sequence"
QSALTQPASVSGSPGQSMSCTGTSSDVGGYNYVSWYQQHPGKAPKLMIYDVSNRPSGVSNRFSGSKSGNTASLTISGLQAEDEADYYCSSYTSSSTSKVFGGGTKLTVLGSRGGGGSGGGGSGGGGSLEMAEVQLVESGGGVVRPGGSLRLSCAASGFTFGDYGMSWVRQAPGKGLEWVSGINWNGGSTGYADSVKGRFTISRDNAKNSLYLQMNSLRAEDTAVYYCARSKYNFHVYYDYWGQGTLVTVSSTSGQAGQHHHHHHGAYPYDVPDYAS

SEQ ID NO: 636 - protein, 249 aa, Artificial Sequence
  source: /note="Description of Artificial Sequence: Synthetic scFv sequence"
QSALTQPASVSGSPGQSRRISCTGTSSDVGGYNSVSWYQQHPGKAPRLMIYDVSNRPSGVSNRFSGSKSGNTASLTISGLQAEDEADYYCSSYTSSSTPLVFGTGTKVTVLGSRGGGGSGGGGSGGGGSLEMAQVQLVQSGAEVKKPGASVKVSCKASGYTFTSYGISWVRQAPGQGLEWMGWISAYNGNTNYAQKLQGRVTMTTDTSTSTAYMELRSLRSDDTAVYYCARGAVAYHDWGQGTLVTVSS

SEQ ID NO: 637 - protein, 253 aa, Artificial Sequence
  source: /note="Description of Artificial Sequence: Synthetic scFv sequence"
QSALTQPASVSGSPGQSRRISCTGTSSDVGGYNYVSWYQQHPGKAPKLMIYDVSNRPSGVSNRFSGSKSGNTASLTISGLQAEDEADYYCSSYTSSSTSKVFGGGTKLTVLGSRGGGGSGGGGSGGGGSLEMAEVQLVESGGGVVRPGGSLRLSCAASGFTFGDYGMSWVRQAPGKGLEWVSGINWNGGSTGYADSVKGRFTISRDNAKNSLYLQMNSLRAEDTAVYYCARSKYNFHVYYDYWGQGTLVTVSS

SEQ ID NO: 638 - protein, 278 aa, Artificial Sequence
  source: /note="Description of Artificial Sequence: Synthetic scFv sequence"
QSALTQPASVSGSPGQSRRISCTGTSSDVGGYNYVSWYQQHPGKAPKLMIYDVSNRPSGVSNRFSGSKSGNTASLTISGLQAEDEADYYCSSYTSSSTSKVFGGGTKLTVLGSRGGGGSGGGGSGGGGSLEMAEVQLVESGGGVVRPGGSLRLSCAASGFTFGDYGMSWVRQAPGKGLEWVSGINWNGGSTGYADSVKGRFTISRDNAKNSLYLQMNSLRAEDTAVYYCARSKYNFHVYYDYWGQGTLVTVSSTSGQAGQHHHHHHGAYPYDVPDYAS

SEQ ID NO: 639 - protein, 251 aa, Artificial Sequence
  source: /note="Description of Artificial Sequence: Synthetic scFv sequence"
QSVLTQPPAASGTPGQRVTISCSGGVSNIGSGALNWYQQLPGTAPKLLIYSYNQRPSGVSDRFSGSRSATSASLAISGLQSEDEADYYCATWDDSVNGWVFGGGTKLTVLGSRGGGGSGGGGSGGGGSLEMAQVQLVQSGAEVKKPGDSVKVSCKPSGYNFLNYGINWVRQAPGQGLEWMGWISTYTGNTNYAQKLQGRVTFTTDTSTSTAYMEMRSLRSDDTAVYYCARDLYYYEGVDYWGQGTLVTVSS

SEQ ID NO: 640 - protein, 276 aa, Artificial Sequence
  source: /note="Description of Artificial Sequence: Synthetic scFv sequence"
QSVLTQPPAASGTPGQRVTISCSGGVSNIGSGALNWYQQLPGTAPKLLIYSYNQRPSGVSDRFSGSRSATSASLAISGLQSEDEADYYCATWDDSVNGWVFGGGTKLTVLGSRGGGGSGGGGSGGGGSLEMAQVQLVQSGAEVKKPGDSVKVSCKPSGYNFLNYGINWVRQAPGQGLEWMGWISTYTGNTNYAQKLQGRVTFTTDTSTSTAYMEMRSLRSDDTAVYYCARDLYYYEGVDYWGQGTLVTVSSTSGQAGQHHHHHHGAYPYDVPDYAS

SEQ ID NO: 641 - protein, 254 aa, Artificial Sequence
  source: /note="Description of Artificial Sequence: Synthetic scFv sequence"
QSVLTQPPSASGTPGQRVTISCSGSSSNIGSNTVNWYQQLPGTAPKLLIYSNDQRPSGVPDRFSGSKSGTSASLAISGLQSEDEADYYCASWDDSLNGRYVFGTGTKVTVLGSRGGGGSGGGGSGGGGSLEMAQVQLVQSGAEVRKPGASVKVSCKTSGYTFSWYAIHWVRQAPGQRLEWMGWINAGNGNTKYSQKFQGRVSLTRDTSASTAYMELSSLRSDDTAVYYCARPDNYGSGGDVFDRGQGTMVTVSS

SEQ ID NO: 642 - protein, 279 aa, Artificial Sequence
  source: /note="Description of Artificial Sequence: Synthetic scFv sequence"
QSVLTQPPSASGTPGQRVTISCSGSSSNIGSNTVNWYQQLPGTAPKLLIYSNDQRPSGVPDRFSGSKSGTSASLAISGLQSEDEADYYCASWDDSLNGRYVFGTGTKVTVLGSRGGGGSGGGGSGGGGSLEMAQVQLVQSGAEVRKPGASVKVSCKTSGYTFSWYAIHWVRQAPGQRLEWMGWINAGNGNTKYSQKFQGRVSLTRDTSASTAYMELSSLRSDDTAVYYCARPDNYGSGGDVFDRGQGTMVTVSSTSGQAGQHHHHHHGAYPYDVPDYAS

SEQ ID NO: 643 - protein, 249 aa, Artificial Sequence
  source: /note="Description of Artificial Sequence: Synthetic scFv sequence"
QSVLTQPPSASGTPGQRVTISCSGSSSNIGSNTVNWYQQLPGTAPKLLIYSNNQRPSGVPDRFSGSKSGTSASLAISGLQSEDEADYYCAAWDDSLNGYVFGTGTKVTVLGSRGGGGSGGGGSGGGGSLEMAQVQLQQWGAGLLKPSETLSLTCAVYGGSFSGYYWSWIRQPPGKGLEWIGEINHSGSTNYNPSLKSRVTISVDTSKNQFSLKLSSVTAADTAVYYCAREGPYDGFDSWGQGTLVTVSS

SEQ ID NO: 644 - protein, 274 aa, Artificial Sequence
  source: /note="Description of Artificial Sequence: Synthetic scFv sequence"
QSVLTQPPSASGTPGQRVTISCSGSSSNIGSNTVNWYQQLPGTAPKLLIYSNNQRPSGVPDRFSGSKSGTSASLAISGLQSEDEADYYCAAWDDSLNGYVFGTGTKVTVLGSRGGGGSGGGGSGGGGSLEMAQVQLQQWGAGLLKPSETLSLTCAVYGGSFSGYYWSWIRQPPGKGLEWIGEINHSGSTNYNPSLKSRVTISVDTSKNQFSLKLSSVTAADTAVYYCAREGPYDGFDSWGQGTLVTVSSTSGQAGQHHHHHHGAYPYDVPDYAS

SEQ ID NO: 645 - protein, 250 aa, Artificial Sequence
  source: /note="Description of Artificial Sequence: Synthetic scFv sequence"
QSVLTQPPSASGTPGQRVTISCSGSSSNIGSNTVNWYQQLPGTAPKLLIYSNNQRPSGVPDRFSGSKSGTSASLAISGLQSEDEADYYCAAWDDSLNGYWVFGGGTKLTVLGSRGGGGSGGGGSGGGGSLEMAQVQLQQWGAGLLKPSETLSLTCAVYGGSFSGYYWSWIRQPPGKGLEWIGEINHSGSTNYNPSLKSRVTISVDTSKNQFSLKLSSVTAADTAVYYCAREGAFDAFDIWGQGTMVTVSS

SEQ ID NO: 646 - protein, 275 aa, Artificial Sequence
  source: /note="Description of Artificial Sequence: Synthetic scFv sequence"
QSVLTQPPSASGTPGQRVTISCSGSSSNIGSNTVNWYQQLPGTAPKLLIYSNNQRPSGVPDRFSGSKSGTSASLAISGLQSEDEADYYCAAWDDSLNGYWVFGGGTKLTVLGSRGGGGSGGGGSGGGGSLEMAQVQLQQWGAGLLKPSETLSLTCAVYGGSFSGYYWSWIRQPPGKGLEWIGEINHSGSTNYNPSLKSRVTISVDTSKNQFSLKLSSVTAADTAVYYCAREGAFDAFDIWGQGTMVTVSSTSGQAGQHHHHHHGAYPYDVPDYAS

SEQ ID NO: 647 - protein, 250 aa, Artificial Sequence
  source: /note="Description of Artificial Sequence: Synthetic scFv sequence"
QSVLTQPPSASGTPGQRVTISCSGSSSNIGTNGVNWFQQFPGTAPKLLIYTNDQRPSGVPDRFSGSKSGTSASLAISGLQSADEADYYCAVWDHSLNGPVFGGGTKLTVLGSRGGGGSGGGGSGGGGSLEMAQVQLVQSGAEVKKPGSSVKVSCKASGGTFSSYAISWVRQAPGQGLEWMGGIIPIFGTANYAQKFQGRVTITADESTSTAYMELSSLRSEDTAVYYCARGAGFDAFDIWGQGTMVTVSS

SEQ ID NO: 648 - protein, 275 aa, Artificial Sequence
  source: /note="Description of Artificial Sequence: Synthetic scFv sequence"
QSVLTQPPSASGTPGQRVTISCSGSSSNIGTNGVNWFQQFPGTAPKLLIYTNDQRPSGVPDRFSGSKSGTSASLAISGLQSADEADYYCAVWDHSLNGPVFGGGTKLTVLGSRGGGGSGGGGSGGGGSLEMAQVQLVQSGAEVKKPGSSVKVSCKASGGTFSSYAISWVRQAPGQGLEWMGGIIPIFGTANYAQKFQGRVTITADESTSTAYMELSSLRSEDTAVYYCARGAGFDAFDIWGQGTMVTVSSTSGQAGQHHHHHHGAYPYDVPDYAS

SEQ ID NO: 649 - protein, 252 aa, Artificial Sequence
  source: /note="Description of Artificial Sequence: Synthetic scFv sequence"
QSVLTQPPSASGTPGQTVTISCSGSNSNIGSNYVYWYQQLPGTAPKLLIYRNNQRPSGVPDRFSGSKSGTSASLAISGLRSEDEADYYCAAWDDSLSAYVFGTGTKVTVLGSRGGGGSGGGGSGGGGSLEMAQVQLVQSGAEVKKPGASVKVSCKASGYTFTSYGISWVRQAPGQGLEWMGWISAYNGNTNYAQKLQGRVTMTTDTSTSTAYMELRSLRSDDTAVYYCARSSGNMVSWKDMWGQGTLVTVSS

SEQ ID NO: 650 - protein, 277 aa, Artificial Sequence
  source: /note="Description of Artificial Sequence: Synthetic scFv sequence"
QSVLTQPPSASGTPGQTVTISCSGSNSNIGSNYVYWYQQLPGTAPKLLIYRNNQRPSGVPDRFSGSKSGTSASLAISGLRSEDEADYYCAAWDDSLSAYVFGTGTKVTVLGSRGGGGSGGGGSGGGGSLEMAQVQLVQSGAEVKKPGASVKVSCKASGYTFTSYGISWVRQAPGQGLEWMGWISAYNGNTNYAQKLQGRVTMTTDTSTSTAYMELRSLRSDDTAVYYCARSSGNMVSWKDMWGQGTLVTVSSTSGQAGQHHHHHHGAYPYDVPDYAS

SEQ ID NO: 651 - protein, 249 aa, Artificial Sequence
  source: /note="Description of Artificial Sequence: Synthetic scFv sequence"
QSVLTQPPSVSAAAGQKVTISCSGSDSNIGNNYVSWYQHLPGTAPKLLIYDVKNRPSGIPDRFSGSKSGSSATLGIAGLQPGDEADYYCGTWDSRLDAYVFGTGTKVTVLGSRGGGGSGGGGSGGGGSLEMAQMQLVQSGAEVKKPGASVKVSCKTSGFPFNIFGITWVRQAPGQGLEWMGWISGYNGNTDYPQKFQGRVTMSTDTSTSTAYMELRNLKSDDTAVYYCARGAYGGMDTWGQGTLVTVSS

SEQ ID NO: 652 - protein, 274 aa, Artificial Sequence
  source: /note="Description of Artificial Sequence: Synthetic scFv sequence"
QSVLTQPPSVSAAAGQKVTISCSGSDSNIGNNYVSWYQHLPGTAPKLLIYDVKNRPSGIPDRFSGSKSGSSATLGIAGLQPGDEADYYCGTWDSRLDAYVFGTGTKVTVLGSRGGGGSGGGGSGGGGSLEMAQMQLVQSGAEVKKPGASVKVSCKTSGFPFNIFGITWVRQAPGQGLEWMGWISGYNGNTDYPQKFQGRVTMSTDTSTSTAYMELRNLKSDDTAVYYCARGAYGGMDTWGQGTLVTVSSTSGQAGQHHHHHHGAYPYDVPDYAS

SEQ ID NO: 653 - protein, 249 aa, Artificial Sequence
  source: /note="Description of Artificial Sequence: Synthetic scFv sequence"
QSVLTQPPSVSAAPGQKVTISCSGSNSNIGNNYVSWYQQLPGTAPKLLIYDNNKRPSGIPDRFSGSRSGTSATLGITGLQTGDEADYYCGTWNTTVTPGYVFGTGTKVTVLGSRGGGGSGGGGSGGGGSLEMAEVQLVQSGAEVKKPGASVKVSCKASGYTFTSYGISWVRQAPGQGLEWMGWISAYNGNTNYAQKLQGRVTMTTDTSTSTAYMELRSLRSDDTAMYYCARSVYDLDTWGQGTLVTVSS

SEQ ID NO: 654 - protein, 274 aa, Artificial Sequence
  source: /note="Description of Artificial Sequence: Synthetic scFv sequence"
QSVLTQPPSVSAAPGQKVTISCSGSNSNIGNNYVSWYQQLPGTAPKLLIYDNNKRPSGIPDRFSGSRSGTSATLGITGLQTGDEADYYCGTWNTTVTPGYVFGTGTKVTVLGSRGGGGSGGGGSGGGGSLEMAEVQLVQSGAEVKKPGASVKVSCKASGYTFTSYGISWVRQAPGQGLEWMGWISAYNGNTNYAQKLQGRVTMTTDTSTSTAYMELRSLRSDDTAMYYCARSVYDLDTWGQGTLVTVSSTSGQAGQHHHHHHGAYPYDVPDYAS

SEQ ID NO: 655 - protein, 256 aa, Artificial Sequence
  source: /note="Description of Artificial Sequence: Synthetic scFv sequence"
QSVLTQPPSVSAPPGQKVTISCSGSSSNIGNNYVSWYQQFPGTAPKLLIYDNNKRPSGISDRFSGSKSGTSATLGIAGLQTGDEADYYCGTWDTSLSGFYVFGSGTKVTVLGSRGGGGSGGGGSGGGGSLEMAEVQLVQSGAEVKKPGASVKVSCKASGYTFTSYTISWVRQAPGQGLEWMGWISTYNGLTNYAQNLQGRVTMTTDTFTTTAYMELRSLRSDDTAVYYCVREGSPDYGDFASFDYWGQGTLVTVSS

SEQ ID NO: 656 - protein, 281 aa, Artificial Sequence
  source: /note="Description of Artificial Sequence: Synthetic scFv sequence"
QSVLTQPPSVSAPPGQKVTISCSGSSSNIGNNYVSWYQQFPGTAPKLLIYDNNKRPSGISDRFSGSKSGTSATLGIAGLQTGDEADYYCGTWDTSLSGFYVFGSGTKVTVLGSRGGGGSGGGGSGGGGSLEMAEVQLVQSGAEVKKPGASVKVSCKASGYTFTSYTISWVRQAPGQGLEWMGWISTYNGLTNYAQNLQGRVTMTTDTFTTTAYMELRSLRSDDTAVYYCVREGSPDYGDFASFDYWGQGTLVTVSSTSGQAGQHHHHHHGAYPYDVPDYAS

SEQ ID NO: 657 - protein, 259 aa, Artificial Sequence
  source: /note="Description of Artificial Sequence: Synthetic scFv sequence"
QSVLTQPPSVSGAPGQGVTIPCTGSSSNIGAGYDVHWYQQLPGTAPKLLIYGNNNRPSGVPDRFSGSRSGSSASLAITGLQAEDEADYYCQSYDSSLSDVVFGGGTKVTVLGSRGGGGSGGGGSGGGGSLEMAEVQLVQSGAEVKKPGATVKISCKVSGYTFTDYYMHWVQQAPGKGLEWMGLVDPEDGETIYAEKFQGRVTITADTSTDTAYMELSSLRSEDTAVYYCARYWSYSFDYLYMPEGNDWWGQGTLVTVSS

SEQ ID NO: 658 - protein, 284 aa, Artificial Sequence
  source: /note="Description of Artificial Sequence: Synthetic scFv sequence"
QSVLTQPPSVSGAPGQGVTIPCTGSSSNIGAGYDVHWYQQLPGTAPKLLIYGNNNRPSGVPDRFSGSRSGSSASLAITGLQAEDEADYYCQSYDSSLSDVVFGGGTKVTVLGSRGGGGSGGGGSGGGGSLEMAEVQLVQSGAEVKKPGATVKISCKVSGYTFTDYYMHWVQQAPGKGLEWMGLVDPEDGETIYAEKFQGRVTITADTSTDTAYMELSSLRSEDTAVYYCARYWSYSFDYLYMPEGNDWWGQGTLVTVSSTSGQAGQHHHHHHGAYPYDVPDYAS

SEQ ID NO: 659 - protein, 251 aa, Artificial Sequence
  source: /note="Description of Artificial Sequence: Synthetic scFv sequence"
QSVLTQPPSVSGAPGQRVTISCTGSSSNIGAGFDVHWYQLLPGTAPKLLIYANSNRPSGVPDRFSGSKSGTSASLAITGLLAEDEADYYCQSYDSSLSGVVFGGGTKLTVLGSRGGGGSGGGGSGGGGSLEMAQVQLVQSGAEVKKPGSSVKVSCKASGGTFSSYAISWVRQAPGQGLEWMGGIIPIFGTANYAQKFQGRVTITADESTSTAYMELSSLRSEDTAVYYCARGASFDRHDNWGQGTLVTVSS

SEQ ID NO: 660 - protein, 276 aa, Artificial Sequence
  source: /note="Description of Artificial Sequence: Synthetic scFv sequence"
QSVLTQPPSVSGAPGQRVTISCTGSSSNIGAGFDVHWYQLLPGTAPKLLIYANSNRPSGVPDRFSGSKSGTSASLAITGLLAEDEADYYCQSYDSSLSGVVFGGGTKLTVLGSRGGGGSGGGGSGGGGSLEMAQVQLVQSGAEVKKPGSSVKVSCKASGGTFSSYAISWVRQAPGQGLEWMGGIIPIFGTANYAQKFQGRVTITADESTSTAYMELSSLRSEDTAVYYCARGASFDRHDNWGQGTLVTVSSTSGQAGQHHHHHHGAYPYDVPDYAS

SEQ ID NO: 661 - protein, 249 aa, Artificial Sequence
  source: /note="Description of Artificial Sequence: Synthetic scFv sequence"
QSVLTQPPSVSGAPGQRVTISCTGSSSNIGAGYDVHWYQQLPGTAPKLLIYGNSNRPSGVPDRFSGSKSGTSASLAITGLQAEDEADYYCQSYDSSLSGYVFGTGTKVTVLGSRGGGGSGGGGSGGGGSLEMAQVQLVQSGAEVKKPGASVKVSCKVSGYTLTELSMHWVRQAPGKGLEWMGGFDPEDGETIYAQKFQGRVTMTEDTSTDTAYMELSSLRSEDTAVYYCARYSGVYYDWGQGTLVTVSS

SEQ ID NO: 662 - protein, 274 aa, Artificial Sequence
  source: /note="Description of Artificial Sequence: Synthetic scFv sequence"
QSVLTQPPSVSGAPGQRVTISCTGSSSNIGAGYDVHWYQQLPGTAPKLLIYGNSNRPSGVPDRFSGSKSGTSASLAITGLQAEDEADYYCQSYDSSLSGYVFGTGTKVTVLGSRGGGGSGGGGSGGGGSLEMAQVQLVQSGAEVKKPGASVKVSCKVSGYTLTELSMHWVRQAPGKGLEWMGGFDPEDGETIYAQKFQGRVTMTEDTSTDTAYMELSSLRSEDTAVYYCARYSGVYYDWGQGTLVTVSSTSGQAGQHHHHHHGAYPYDVPDYAS

SEQ ID NO: 663 - protein, 253 aa, Artificial Sequence
  source: /note="Description of Artificial Sequence: Synthetic scFv sequence"
QSVLTQPPSVSGAPGQRVTISCTGSSSNIGARYDVHWYQQLPGTAPRLLISANYDRPSGVPDRFSGSKSGTSASLAITGLQAEDEADYYCQSYDSSVSAWVFGGGTKVTVLGSRGGGGSGGGGSGGGGSLEMAEVQLVQSGAEVKEPGASVRISCQASGYNFISYYMHWVRQAPGQGLEWMGTINPGSGETDYSQKLQGRVTMTRDPSTGTFDMGLSSLTSGDTAVYYCATGLIRGASDAFNRGRGTMVTVSS

SEQ ID NO: 664 - protein, 278 aa, Artificial Sequence
  source: /note="Description of Artificial Sequence: Synthetic scFv sequence"
QSVLTQPPSVSGAPGQRVTISCTGSSSNIGARYDVHWYQQLPGTAPRLLISANYDRPSGVPDRFSGSKSGTSASLAITGLQAEDEADYYCQSYDSSVSAWVFGGGTKVTVLGSRGGGGSGGGGSGGGGSLEMAEVQLVQSGAEVKEPGASVRISCQASGYNFISYYMHWVRQAPGQGLEWMGTINPGSGETDYSQKLQGRVTMTRDPSTGTFDMGLSSLTSGDTAVYYCATGLIRGASDAFNRGRGTMVTVSSTSGQAGQHHHHHHGAYPYDVPDYAS

SEQ ID NO: 665 - protein, 251 aa, Artificial Sequence
  source: /note="Description of Artificial Sequence: Synthetic scFv sequence"
QSVLTQPPSVSGAPGQRVTISCTGSTSNIGAGYDVHWYQQLPGTAPKLLINNNRNRPSGVPDRFSGSKSGTSATLGITGLQTGDEADYYCGTWDGSLTGAVFGGGTKLTVLGSRGGGGSGGGGSGGGGSLEMAEVQLVQSGAEVKKPGSSVKVSCKASGGTFSSYAISWVRQAPGQGLEWMGGIIPIFGTANYAQKFQGRVTITADESTSTAYMELSSLRSEDTAVYYCARGSALDHYDRWGQGTLVTVSS

SEQ ID NO: 666 - protein, 276 aa, Artificial Sequence
  source: /note="Description of Artificial Sequence: Synthetic scFv sequence"
QSVLTQPPSVSGAPGQRVTISCTGSTSNIGAGYDVHWYQQLPGTAPKLLINNNRNRPSGVPDRFSGSKSGTSATLGITGLQTGDEADYYCGTWDGSLTGAVFGGGTKLTVLGSRGGGGSGGGGSGGGGSLEMAEVQLVQSGAEVKKPGSSVKVSCKASGGTFSSYAISWVRQAPGQGLEWMGGIIPIFGTANYAQKFQGRVTITADESTSTAYMELSSLRSEDTAVYYCARGSALDHYDRWGQGTLVTVSSTSGQAGQHHHHHHGAYPYDVPDYAS

SEQ ID NO: 667 - protein, 260 aa, Artificial Sequence
  source: /note="Description of Artificial Sequence: Synthetic scFv sequence"
QSVLTQPPSVSGAPGQRVTVSCTGSRSNIGAGYDVHWYQQLPGTAPKLLIYGNSNRPPGVPDRFSGSKSGTSASLVITGLQAEDAADYYCQSYDNTVRESPYVFGTGTKVTVLGSRGGGGSGGGGSGGGGSLEMAEVQLVQSGAEVKKPGASVKVSCKVSGYTLTELSMHWVRQAPGKGLEWMGGFDPEDGETIYAQKFQGRVTMTEDTSTDTAYMELSSLRSEDTAVYYCATESNLVSRHYYYYGMDVWGQGTTVTVSS

SEQ ID NO: 668 - protein, 285 aa, Artificial Sequence
  source: /note="Description of Artificial Sequence: Synthetic scFv sequence"
QSVLTQPPSVSGAPGQRVTVSCTGSRSNIGAGYDVHWYQQLPGTAPKLLIYGNSNRPPGVPDRFSGSKSGTSASLVITGLQAEDAADYYCQSYDNTVRESPYVFGTGTKVTVLGSRGGGGSGGGGSGGGGSLEMAEVQLVQSGAEVKKPGASVKVSCKVSGYTLTELSMHWVRQAPGKGLEWMGGFDPEDGETIYAQKFQGRVTMTEDTSTDTAYMELSSLRSEDTAVYYCATESNLVSRHYYYYGMDVWGQGTTVTVSSTSGQAGQHHHHHHGAYPYDVPDYAS

SEQ ID NO: 669 - protein, 250 aa, Artificial Sequence
  source: /note="Description of Artificial Sequence: Synthetic scFv sequence"
QSVLTQPPSVSVSPGQTASISCSGNKLGTKYVYWYQKRPGQSPVLVMYEDNQRPSGIPERFSGSNSGNTATLTIRGTQTVDEADYYCQAWDSDTFVVFGGGTKVTVLGSRGGGGSGGGGSGGGGSLEMAEVQLVETGGGVVQPGRSLRLSCAASGFTFSSYGMHWVRQAPGKGLEWVAVISHDGSNKYYADSVKGRFTISRDNSKDTLYLQMNSLRGEDTAVYYCARSNQWSGYFSFDYWGQGTLVTVSS

SEQ ID NO: 670 - protein, 275 aa, Artificial Sequence
  source: /note="Description of Artificial Sequence: Synthetic scFv sequence"
QSVLTQPPSVSVSPGQTASISCSGNKLGTKYVYWYQKRPGQSPVLVMYEDNQRPSGIPERFSGSNSGNTATLTIRGTQTVDEADYYCQAWDSDTFVVFGGGTKVTVLGSRGGGGSGGGGSGGGGSLEMAEVQLVETGGGVVQPGRSLRLSCAASGFTFSSYGMHWVRQAPGKGLEWVAVISHDGSNKYYADSVKGRFTISRDNSKDTLYLQMNSLRGEDTAVYYCARSNQWSGYFSFDYWGQGTLVTVSSTSGQAGQHHHHHHGAYPYDVPDYAS

SEQ ID NO: 671 - protein, 248 aa, Artificial Sequence
  source: /note="Description of Artificial Sequence: Synthetic scFv sequence"
QSVLTQPPSVSVSPGQTATIACSGHKLGDKYASWYQQKSGQSPVLIIYQDNKRPSGIPERFSGSNSGNTATLTISGTQALDEADYYCQAWDSSTYVAFGGGTKLTVLGSRGGGGSGGGGSGGGGSLEMAQVQLQESGPGLVKPSETLSLTCVVSGGSISSSNWWSWVRQPPGKGLEWIGEIYHSGSPNYNPSLKSRVTISVDKSKNQFSLKLSSVTAADTAVYYCARMTTHTFGYDAWGQGTLVTVSS

SEQ ID NO: 672 - protein, 273 aa, Artificial Sequence
  source: /note="Description of Artificial Sequence: Synthetic scFv sequence"
QSVLTQPPSVSVSPGQTATIACSGHKLGDKYASWYQQKSGQSPVLIIYQDNKRPSGIPERFSGSNSGNTATLTISGTQALDEADYYCQAWDSSTYVAFGGGTKLTVLGSRGGGGSGGGGSGGGGSLEMAQVQLQESGPGLVKPSETLSLTCVVSGGSISSSNWWSWVRQPPGKGLEWIGEIYHSGSPNYNPSLKSRVTISVDKSKNQFSLKLSSVTAADTAVYYCARMTTHTFGYDAWGQGTLVTVSSTSGQAGQHHHHHHGAYPYDVPDYAS

SEQ ID NO: 673 - protein, 257 aa, Artificial Sequence
  source: /note="Description of Artificial Sequence: Synthetic scFv sequence"
QSVVTQPPSASGTPGQRVTISCSGSSSNIGSNYVYWYQQLPGTAPKLLIYSNNQRPSGVPDRFSGSKSGTSASLAISGLRSEDEADYYCAAWDDSLSGYVFGTGTKLTVLGSRGGGGSGGGGSGGGGSLEMAQVQLQQWGAGLLKPSETLSLTCAVYGGSFSGYYWSWIRQPPGKGLEWIGEINHSGSTNYNPSLKSRVTISVDTSKNQFSLKLSSVTAADTAVYYCARLYEGGYHGWGSWLSSDSWGQGTLVTVSS

SEQ ID NO: 674 - protein, 282 aa, Artificial Sequence
  source: /note="Description of Artificial Sequence: Synthetic scFv sequence"
QSVVTQPPSASGTPGQRVTISCSGSSSNIGSNYVYWYQQLPGTAPKLLIYSNNQRPSGVPDRFSGSKSGTSASLAISGLRSEDEADYYCAAWDDSLSGYVFGTGTKLTVLGSRGGGGSGGGGSGGGGSLEMAQVQLQQWGAGLLKPSETLSLTCAVYGGSFSGYYWSWIRQPPGKGLEWIGEINHSGSTNYNPSLKSRVTISVDTSKNQFSLKLSSVTAADTAVYYCARLYEGGYHGWGSWLSSDSWGQGTLVTVSSTSGQAGQHHHHHHGAYPYDVPDYAS

SEQ ID NO: 675 - protein, 256 aa, Artificial Sequence
  source: /note="Description of Artificial Sequence: Synthetic scFv sequence"
QSVVTQPPSVSAAPGEKVTISCSGSNFNVGNNDVSWYQQLPGAAPKLLIYDNNKRPSGIPDRFSGSKSGTSATLDITGLHSDDEADYYCGTWDSSLNTGGVFGTGTKVTVLGSRGGGGSGGGGSGGGGSLEMAEVQLVQSGAEVKKPGASVKVSCKASGYTFTSYTISWVRQAPGQGLEWMGWISTYNGLTNYAQNLQGRVTMTTDTFTTTAYMELRSLRSDDTAVYYCVREGSPDYGDFASFDYWGQGTLVTVSS

SEQ ID NO: 676 - protein, 281 aa, Artificial Sequence
  source: /note="Description of Artificial Sequence: Synthetic scFv sequence"
QSVVTQPPSVSAAPGEKVTISCSGSNFNVGNNDVSWYQQLPGAAPKLLIYDNNKRPSGIPDRFSGSKSGTSATLDITGLHSDDEADYYCGTWDSSLNTGGVFGTGTKVTVLGSRGGGGSGGGGSGGGGSLEMAEVQLVQSGAEVKKPGASVKVSCKASGYTFTSYTISWVRQAPGQGLEWMGWISTYNGLTNYAQNLQGRVTMTTDTFTTTAYMELRSLRSDDTAVYYCVREGSPDYGDFASFDYWGQGTLVTVSSTSGQAGQHHHHHHGAYPYDVPDYAS

SEQ ID NO: 677 - protein, 252 aa, Artificial Sequence
  source: /note="Description of Artificial Sequence: Synthetic scFv sequence"
QSVVTQPPSVSAAPGQKVTISCSGSSSNIGNNYVSWYQQLPGTAPKLLIYDNNKRPSGIPDRFSGSKSGTSATLGITGLQTGDEADYYCGTWDSSLGAPYVFGTGTKVTVLGSRGGGGSGGGGSGGGGSLEMAEVQLVQSWGGSEQPGRSLRLSCAASGFTFDDYAMHWVRQAPGKGLEWVSGISWNSGSIGYADSVKGRFTISRDNAKNSLYLQMNSLRAEDTAMYYCARYRQVGSAYDSWGQGTLVTVSS

SEQ ID NO: 678 - protein, 277 aa, Artificial Sequence
  source: /note="Description of Artificial Sequence: Synthetic scFv sequence"
QSVVTQPPSVSAAPGQKVTISCSGSSSNIGNNYVSWYQQLPGTAPKLLIYDNNKRPSGIPDRFSGSKSGTSATLGITGLQTGDEADYYCGTWDSSLGAPYVFGTGTKVTVLGSRGGGGSGGGGSGGGGSLEMAEVQLVQSWGGSEQPGRSLRLSCAASGFTFDDYAMHWVRQAPGKGLEWVSGISWNSGSIGYADSVKGRFTISRDNAKNSLYLQMNSLRAEDTAMYYCARYRQVGSAYDSWGQGTLVTVSSTSGQAGQHHHHHHGAYPYDVPDYAS

SEQ ID NO: 679 - protein, 256 aa, Artificial Sequence
  source: /note="Description of Artificial Sequence: Synthetic scFv sequence"
QSVVTQPPSVSAAPGQKVTISCSGSSSNIGNNYVSWYQQLPGTAPKLLIYDNNKRPSGIPDRFSGSKSGTSATLGITGLQTGDEADYYCGTWDSSLSAAYVFGTGTKVTVLGSRGGGGSGGGGSGGGGSLEMAQVQLVQSGAEVKKPGASVKVSCKASGYSFTSYTISWVRQAPGQGLEWMGWVSTYNGLRNYAQNLQGRVTMTTDTLTTTAYMELRSLRSDDTAVYYCVREGSPDYGDFAAFDYWGQGTLVTVSS

SEQ ID NO: 680 - protein, 281 aa, Artificial Sequence
  source: /note="Description of Artificial Sequence: Synthetic scFv sequence"
QSVVTQPPSVSAAPGQKVTISCSGSSSNIGNNYVSWYQQLPGTAPKLLIYDNNKRPSGIPDRFSGSKSGTSATLGITGLQTGDEADYYCGTWDSSLSAAYVFGTGTKVTVLGSRGGGGSGGGGSGGGGSLEMAQVQLVQSGAEVKKPGASVKVSCKASGYSFTSYTISWVRQAPGQGLEWMGWVSTYNGLRNYAQNLQGRVTMTTDTLTTTAYMELRSLRSDDTAVYYCVREGSPDYGDFAAFDYWGQGTLVTVSSTSGQAGQHHHHHHGAYPYDVPDYAS

SEQ ID NO: 681 - protein, 253 aa, Artificial Sequence
  source: /note="Description of Artificial Sequence: Synthetic scFv sequence"
QSVVTQPPSVSAAPGQKVTISCSGSSSNIGNNYVSWYQQLPGTAPKLLIYDNNKRPSGIPDRFSGSKSGTSATLGITGLQTGDEADYYCGTWDSSLSAYVFGTGTKVTVLGSRGGGGSGGGGSGGGGSLEMAQVQLVQSGAEVKKPGASVKVSCKASGYTFTNYALHWVRQAPGQGLEWMAWINGGNGNTKYSQNFQGRVTITRDTSASTAYMELSSLRSEDTAVYYCAKPEETAGTIHFDYWGQGTPVTVSS

SEQ ID NO: 682 - protein, 278 aa, Artificial Sequence
  source: /note="Description of Artificial Sequence: Synthetic scFv sequence"
QSVVTQPPSVSAAPGQKVTISCSGSSSNIGNNYVSWYQQLPGTAPKLLIYDNNKRPSGIPDRFSGSKSGTSATLGITGLQTGDEADYYCGTWDSSLSAYVFGTGTKVTVLGSRGGGGSGGGGSGGGGSLEMAQVQLVQSGAEVKKPGASVKVSCKASGYTFTNYALHWVRQAPGQGLEWMAWINGGNGNTKYSQNFQGRVTITRDTSASTAYMELSSLRSEDTAVYYCAKPEETAGTIHFDYWGQGTPVTVSSTSGQAGQHHHHHHGAYPYDVPDYAS

SEQ ID NO: 683 - protein, 249 aa, Artificial Sequence
  source: /note="Description of Artificial Sequence: Synthetic scFv sequence"
QSVVTQPPSVSAAPGQKVTISCSGSTSNIGNNDVSWYQQLPGTAPKLLIYDNNKRPSGIPDRFSGSKSGTSATLGITGLQTGDEADYYCGTWDSSVSASWVFGRGTKLTVLGSRGGGGSGGGGSGGGGSLEMAQVQLVQSGAEVKKPGASVKVSCKASGYTFTSYGISWVRQAPGQGLEWMGWISAYNGNTNYPQKLQGRVTMTTDPSTSTAYMELRSLRSDDTAVYYCARSMTSFDYWGQGTLVTVSS

SEQ ID NO: 684 - protein, 274 aa, Artificial Sequence
  source: /note="Description of Artificial Sequence: Synthetic scFv sequence"
QSVVTQPPSVSAAPGQKVTISCSGSTSNIGNNDVSWYQQLPGTAPKLLIYDNNKRPSGIPDRFSGSKSGTSATLGITGLQTGDEADYYCGTWDSSVSASWVFGRGTKLTVLGSRGGGGSGGGGSGGGGSLEMAQVQLVQSGAEVKKPGASVKVSCKASGYTFTSYGISWVRQAPGQGLEWMGWISAYNGNTNYPQKLQGRVTMTTDPSTSTAYMELRSLRSDDTAVYYCARSMTSFDYWGQGTLVTVSSTSGQAGQHHHHHHGAYPYDVPDYAS

SEQ ID NO: 685 - protein, 274 aa, Artificial Sequence
  source: /note="Description of Artificial Sequence: Synthetic scFv sequence"
QSVVTQPPSVSAAPGQRVTISCSGSSSNISIYDVSWYQQLPGTAPKLLIYGNNKRPSGIADRFSGSTSGTSATLGITGLQTGDEADYYCGTWDDSLSGGVFGGGTKLTVLGRGGGGSGGGGSGGGGSLEMAQMQLVQSGAEVKKPGSSVKVSCEASGGTLSSYAINWVRQAPGQGLEWMGGIIPMFGTAHYAQKFQGRVTITADESTKTAYMELSSLRSEDTAVYYCARGVHYASFDHWGQGTLVTVSSTSGQAGQHHHHHHGAYPYDVPDYAS

SEQ ID NO: 686 - protein, 250 aa, Artificial Sequence
  source: /note="Description of Artificial Sequence: Synthetic scFv sequence"
QSVVTQPPSVSAAPGQRVTISCSGSSSNISIYDVSWYQQLPGTAPKLLIYGNNKRPSGIADRFSGSTSGTSATLGITGLQTGDEADYYCGTWDDSLSGGVFGGGTKLTVLGSRGGGGSGGGGSGGGGSLEMAQMQLVQSGAEVKKPGSSVKVSCEASGGTLSSYAINWVRQAPGQGLEWMGGIIPMFGTAHYAQKFQGRVTITADESTKTAYMELSSLRSEDTAVYYCARGVHYASFDHWGQGTLVTVSS

SEQ ID NO: 687 - protein, 275 aa, Artificial Sequence
  source: /note="Description of Artificial Sequence: Synthetic scFv sequence"
QSVVTQPPSVSAAPGQRVTISCSGSSSNISIYDVSWYQQLPGTAPKLLIYGNNKRPSGIADRFSGSTSGTSATLGITGLQTGDEADYYCGTWDDSLSGGVFGGGTKLTVLGSRGGGGSGGGGSGGGGSLEMAQMQLVQSGAEVKKPGSSVKVSCEASGGTLSSYAINWVRQAPGQGLEWMGGIIPMFGTAHYAQKFQGRVTITADESTKTAYMELSSLRSEDTAVYYCARGVHYASFDHWGQGTLVTVSSTSGQAGQHHHHHHGAYPYDVPDYAS

SEQ ID NO: 688 - protein, 250 aa, Artificial Sequence
  source: /note="Description of Artificial Sequence: Synthetic scFv sequence"
QSVVTQPPSVSGAPGQRVTISCTGSSSNIGAGYDVNWYQQFPGTAPKLLIYGNSNRPSGVPDRFSGSKSGTSASLAITGLQAEDEADYYCQSYDSSLSGSYVFGTGTKVTVLGSRGGGGSGGGGSGGGGSLEMAQMQLVQSGAEVKKPGASVKVSCKASGYTLTELSMHWVRQAPGKGLEWMGGFDPEDGETIYAQKFQGRVTMTEDTSTDTAYMELSSLRSEDTAVYYCARMSSMYYDWGQGTLVTVSS

SEQ ID NO: 689 - protein, 275 aa, Artificial Sequence
  source: /note="Description of Artificial Sequence: Synthetic scFv sequence"
QSVVTQPPSVSGAPGQRVTISCTGSSSNIGAGYDVNWYQQFPGTAPKLLIYGNSNRPSGVPDRFSGSKSGTSASLAITGLQAEDEADYYCQSYDSSLSGSYVFGTGTKVTVLGSRGGGGSGGGGSGGGGSLEMAQMQLVQSGAEVKKPGASVKVSCKASGYTLTELSMHWVRQAPGKGLEWMGGFDPEDGETIYAQKFQGRVTMTEDTSTDTAYMELSSLRSEDTAVYYCARMSSMYYDWGQGTLVTVSSTSGQAGQHHHHHHGAYPYDVPDYAS

SEQ ID NO: 690 - protein, 251 aa, Artificial Sequence
  source: /note="Description of Artificial Sequence: Synthetic scFv sequence"
QSVVTQPPSVSGAPGQRVTISCTGSTSNIGAGYDVHWYQQLPGTAPKLLIYTNNFRPSGVPDRFSASKSGTSASLAITGLQAEDEADYYCGTWDSSLSAVVFGGGTKLTVLGSRGGGGSGGGGSGGGGSLEMAEVQLVESGTEVKKPGASVKVSCKASGYMFTSYGLNWVRQAPGQGLEWMGWISANNGKTNYAKKFQDRVTMTRDTSTSTGYMELRSLRSDDTAVYYCARHIGGSYFDRWGQGTLVTVSS

SEQ ID NO: 691 - protein, 276 aa, Artificial Sequence
  source: /note="Description of Artificial Sequence: Synthetic scFv sequence"
QSVVTQPPSVSGAPGQRVTISCTGSTSNIGAGYDVHWYQQLPGTAPKLLIYTNNFRPSGVPDRFSASKSGTSASLAITGLQAEDEADYYCGTWDSSLSAVVFGGGTKLTVLGSRGGGGSGGGGSGGGGSLEMAEVQLVESGTEVKKPGASVKVSCKASGYMFTSYGLNWVRQAPGQGLEWMGWISANNGKTNYAKKFQDRVTMTRDTSTSTGYMELRSLRSDDTAVYYCARHIGGSYFDRWGQGTLVTVSSTSGQAGQHHHHHHGAYPYDVPDYAS

SEQ ID NO: 692 - protein, 255 aa, Artificial Sequence
  source: /note="Description of Artificial Sequence: Synthetic scFv sequence"
QSVVTQPPSVSGAPGQTVTISCTGGSSNIGTGYFVNWYQQVPGKAPKLLILGNNNRPSGVPDRLSGSTSGTSASLAITGLQAEDEGTYYCQSYDSSLSGYVFGTGTKVTVLGSRGGGGSGGGGSGGGGSLEMAQVQLQQSGPGLVKPSQTLSLTCGISGDSVSTNSVAWHWIRQSPSRGLEWLGRTYYRSKWSNDYGVSVKSRITIIPDTSKNQFSLQLNSVTPEDTAVYYCARSSSWYQIFDYWGQGTLVTVSS

SEQ ID NO: 693 - protein, 280 aa, Artificial Sequence
  source: /note="Description of Artificial Sequence: Synthetic scFv sequence"
QSVVTQPPSVSGAPGQTVTISCTGGSSNIGTGYFVNWYQQVPGKAPKLLILGNNNRPSGVPDRLSGSTSGTSASLAITGLQAEDEGTYYCQSYDSSLSGYVFGTGTKVTVLGSRGGGGSGGGGSGGGGSLEMAQVQLQQSGPGLVKPSQTLSLTCGISGDSVSTNSVAWHWIRQSPSRGLEWLGRTYYRSKWSNDYGVSVKSRITIIPDTSKNQFSLQLNSVTPEDTAVYYCARSSSWYQIFDYWGQGTLVTVSSTSGQAGQHHHHHHGAYPYDVPDYAS

SEQ ID NO: 694 - protein, 247 aa, Artificial Sequence
  source: /note="Description of Artificial Sequence: Synthetic scFv sequence"
QSVVTQPPSVSVAPGKTARITCGGNNIGSKSVHWYQQKPGQAPVLVIYYDSDRPSGIPERFSGSNSGNTATLTISRVEAGDEADYYCQVWDSSSDVVFGGGTKLTVLGSRGGGGSGGGGSGGGGSLEMAEVQLVQSGAEVKKPGASVKVSCKASGYTFTSYGISWVRQAPGQGLEWMGWISAYNGNTNYAQKLQGRVTMTTDTSTSTAYMELRSLRSDDTAVYYCARWGGFGAVDHWGQGTLVTVSS

SEQ ID NO: 695 - protein, 272 aa, Artificial Sequence
  source: /note="Description of Artificial Sequence: Synthetic scFv sequence"
QSVVTQPPSVSVAPGKTARITCGGNNIGSKSVHWYQQKPGQAPVLVIYYDSDRPSGIPERFSGSNSGNTATLTISRVEAGDEADYYCQVWDSSSDVVFGGGTKLTVLGSRGGGGSGGGGSGGGGSLEMAEVQLVQSGAEVKKPGASVKVSCKASGYTFTSYGISWVRQAPGQGLEWMGWISAYNGNTNYAQKLQGRVTMTTDTSTSTAYMELRSLRSDDTAVYYCARWGGFGAVDHWGQGTLVTVSSTSGQAGQHHHHHHGAYPYDVPDYAS

SEQ ID NO: 696 - protein, 245 aa, Artificial Sequence
  source: /note="Description of Artificial Sequence: Synthetic scFv sequence"
SSELTQDPAVSVALGQTVKITCQGDSLTDYHATWYQQKPGQAPVAVIYATNNRPTGIPDRFSGSSSGNTASLTITGAQAEDEADYYCNSRDSGTDEVLFGGGTKLTVLGSRGGGGSGGGGSGGGGSLEMAEVQLVETGGGLVKPGGSLRLSCAASGFTFSSYSMNWVRQAPGKGLEWVSSISSSSSYIYYADSVKGRFTISRDNAKNSLYLQMNSLRAEDTAVYYCARGQGYDYWGQGTLVTVSS

SEQ ID NO: 697 - protein, 270 aa, Artificial Sequence
  source: /note="Description of Artificial Sequence: Synthetic scFv sequence"
SSELTQDPAVSVALGQTVKITCQGDSLTDYHATWYQQKPGQAPVAVIYATNNRPTGIPDRFSGSSSGNTASLTITGAQAEDEADYYCNSRDSGTDEVLFGGGTKLTVLGSRGGGGSGGGGSGGGGSLEMAEVQLVETGGGLVKPGGSLRLSCAASGFTFSSYSMNWVRQAPGKGLEWVSSISSSSSYIYYADSVKGRFTISRDNAKNSLYLQMNSLRAEDTAVYYCARGQGYDYWGQGTLVTVSSTSGQAGQHHHHHHGAYPYDVPDYAS

SEQ ID NO: 698 - protein, 250 aa, Artificial Sequence
  source: /note="Description of Artificial Sequence: Synthetic scFv sequence"
SYELTQPPAASGTPGQRVTISCSGGVSNIGSGALNWYQQLPGTAPKLLIYSYNQRPSGVSDRFSGSRSATSASLAISGLQSEDEADYYCATWDDSVNGWVFGGGTKLTVLGSRGGGGSGGGGSGGGGSLEMAEVQLVESGAEVKKPGDSVKVSCKPSGYNFLNYGINWVRQAPGQGLEWMGWISTYTGNTNYAQKLQGRVTFTTDTSTSTAYMEMRSLRSDDTAVYYCARQQGGGWYDVWGQGTLVTVSS

SEQ ID NO: 699 - protein, 275 aa, Artificial Sequence
  source: /note="Description of Artificial Sequence: Synthetic scFv sequence"
SYELTQPPAASGTPGQRVTISCSGGVSNIGSGALNWYQQLPGTAPKLLIYSYNQRPSGVSDRFSGSRSATSASLAISGLQSEDEADYYCATWDDSVNGWVFGGGTKLTVLGSRGGGGSGGGGSGGGGSLEMAEVQLVESGAEVKKPGDSVKVSCKPSGYNFLNYGINWVRQAPGQGLEWMGWISTYTGNTNYAQKLQGRVTFTTDTSTSTAYMEMRSLRSDDTAVYYCARQQGGGWYDVWGQGTLVTVSSTSGQAGQHHHHHHGAYPYDVPDYAS

SEQ ID NO: 700 - protein, 284 aa, Artificial Sequence
  source: /note="Description of Artificial Sequence: Synthetic scFv sequence"
SYELTQPPSASGTPGQRVTISCSGSSSNIGSNTVNWYQQLPGTAPKLLIYSNNQRPSGVPDRFSGSKSGTSASLAISGLQSEDEADYYCAAWDDSLNGYVFGTGTKVTVLGSRGGGGSGGGGSGGGGSLEMAEVQLVESGAEVKKPGASVKVSCKASGYTFTSYGISWVRQAPGQGLEWMGWISAYNGNTNYAQKLQGRVTMTTDTSTSTAYMELRSLRSDDTAVYYCARDLSRGANPHYYYYYGMDVWGQGTTVTVSSTSGQAGQHHHHHHGAYPYDVPDYAS

SEQ ID NO: 701 - protein, 252 aa, Artificial Sequence
  source: /note="Description of Artificial Sequence: Synthetic scFv sequence"
SYELTQPPSASGTPGQRVTISCSGSSSNIGSNYVYWYQQLPGTAPKLFIYRNNQRPSGVPDRFSGSKSGTSASLAISGLRSEDEADYYCAAWDDSLSGYLFGTGTKVTVLGSRGGGGSGGGGSGGGGSLEMAEVQLVESGGGLVQPGRSLRLSCAASGFTFDDYAMHWVRQAPGKGLEWVSGISWNSGSIGYADSVKGRFTISRDNAKNSLYLQMNSLRAEDTALYYCANGDSNYYYGMDVWGQGTTVTVSS

SEQ ID NO: 702 - protein, 277 aa, Artificial Sequence
  source: /note="Description of Artificial Sequence: Synthetic scFv sequence"
SYELTQPPSASGTPGQRVTISCSGSSSNIGSNYVYWYQQLPGTAPKLFIYRNNQRPSGVPDRFSGSKSGTSASLAISGLRSEDEADYYCAAWDDSLSGYLFGTGTKVTVLGSRGGGGSGGGGSGGGGSLEMAEVQLVESGGGLVQPGRSLRLSCAASGFTFDDYAMHWVRQAPGKGLEWVSGISWNSGSIGYADSVKGRFTISRDNAKNSLYLQMNSLRAEDTALYYCANGDSNYYYGMDVWGQGTTVTVSSTSGQAGQHHHHHHGAYPYDVPDYAS

SEQ ID NO: 703 - protein, 246 aa, Artificial Sequence
  source: /note="Description of Artificial Sequence: Synthetic scFv sequence"
SYVLTQPLSVSVAPGKTARITCGGNNIGSKTVHWYQQKPGQAPVLVIYYDSDRPSGIPERFSGSNSGNTATLTISRVEAGDEADYYCQVWDSSSDHRVFGGGTKLTVLGSRGGGGSGGGGSGGGGSLEMAQVQLQESGPGLVKPSETLSLTCNVSGYSISSGYFWGWIRQPPGKGLEWIGSIYHSRSTYYNPSLKSRVTISVDTSKNQFSLKLNSVTAADTAVYYCARGYGYFDYWGQGTLVTVSS

SEQ ID NO: 704 - protein, 271 aa, Artificial Sequence
  source: /note="Description of Artificial Sequence: Synthetic scFv sequence"
SYVLTQPLSVSVAPGKTARITCGGNNIGSKTVHWYQQKPGQAPVLVIYYDSDRPSGIPERFSGSNSGNTATLTISRVEAGDEADYYCQVWDSSSDHRVFGGGTKLTVLGSRGGGGSGGGGSGGGGSLEMAQVQLQESGPGLVKPSETLSLTCNVSGYSISSGYFWGWIRQPPGKGLEWIGSIYHSRSTYYNPSLKSRVTISVDTSKNQFSLKLNSVTAADTAVYYCARGYGYFDYWGQGTLVTVSSTSGQAGQHHHHHHGAYPYDVPDYAS

SEQ ID NO: 705 - protein, 253 aa, Artificial Sequence
  source: /note="Description of Artificial Sequence: Synthetic scFv sequence"
SYVLTQPPSVSVAPGKTARISCGGNDIGSKSVFWYQQRPGQAPVLVVYDDSDRPSGLPERFSGFNSGNTATLTISRVEAGDEADYYCQVWDSSSDHYVFGTGTKVTVLGSRGGGGSGGGGSGGGGSLEMAQVQLVESGGGLVQPGRSLRLSCAASGFTFDDYAMHWVRQAPGKGLEWVSGISWNSGSIGYADSVKGRFTISRDNAKNSLYLQMNSLRAEDTALYYCAKDITYGSGSYGAFDIWGQGTMVTVSS

SEQ ID NO: 706 - protein, 278 aa, Artificial Sequence
  source: /note="Description of Artificial Sequence: Synthetic scFv sequence"
SYVLTQPPSVSVAPGKTARISCGGNDIGSKSVFWYQQRPGQAPVLVVYDDSDRPSGLPERFSGFNSGNTATLTISRVEAGDEADYYCQVWDSSSDHYVFGTGTKVTVLGSRGGGGSGGGGSGGGGSLEMAQVQLVESGGGLVQPGRSLRLSCAASGFTFDDYAMHWVRQAPGKGLEWVSGISWNSGSIGYADSVKGRFTISRDNAKNSLYLQMNSLRAEDTALYYCAKDITYGSGSYGAFDIWGQGTMVTVSSTSGQAGQHHHHHHGAYPYDVPDYAS

SEQ ID NO: 707 - protein, 248 aa, Artificial Sequence
  source: /note="Description of Artificial Sequence: Synthetic scFv sequence"
SYVLTQPPSVSVAPGKTARITCGGNNIGSKSVHWYQQKPGQAPVLVIYYDSDRPSGIPERFSGSNSGNTATLTISRVEAGDEADYYCQVWDSSSDHPYVFGTGTKVTVLGSRGGGGSGGGGSGGGGSLEMAQMQLVQSGAEVKKPGASVKVSCKASGYTFTSYGISWVRQAPGQGLEWMGWISAYNGNTNYAQKLQGRVTMTTDTSTSTAYMELRSLRSDDTAVYYCARSMFGAHDSWGQGTLVTVSS

SEQ ID NO: 708 - protein, 273 aa, Artificial Sequence
  source: /note="Description of Artificial Sequence: Synthetic scFv sequence"
SYVLTQPPSVSVAPGKTARITCGGNNIGSKSVHWYQQKPGQAPVLVIYYDSDRPSGIPERFSGSNSGNTATLTISRVEAGDEADYYCQVWDSSSDHPYVFGTGTKVTVLGSRGGGGSGGGGSGGGGSLEMAQMQLVQSGAEVKKPGASVKVSCKASGYTFTSYGISWVRQAPGQGLEWMGWISAYNGNTNYAQKLQGRVTMTTDTSTSTAYMELRSLRSDDTAVYYCARSMFGAHDSWGQGTLVTVSSTSGQAGQHHHHHHGAYPYDVPDYAS

SEQ ID NO: 709 - protein, 249 aa, Artificial Sequence
  source: /note="Description of Artificial Sequence: Synthetic scFv sequence"
SYVLTQPPSVSVAPGKTARITCGGNNIGSKSVHWYQQKPGQAPVLVIYYDSDRPSGIPERFSGSNSGNTATLTISRVEAGDEADYYCQVWDSSSDHYVFGTGTKVTVLGSRGGGGSGGGGSGGGGSLEMAEVQLVETGGGLVQPGGSLRLSCAASGFTFSSYAMSWVRQAPGKGLEWVSAISGSDGSTYYADSVKGRFTISRDNSKNTLYLQMNSLRDEDTAVYYCARSHEANLVGDWWGQGTLVTVSS

SEQ ID NO: 710 - protein, 274 aa, Artificial Sequence
  source: /note="Description of Artificial Sequence: Synthetic scFv sequence"
SYVLTQPPSVSVAPGKTARITCGGNNIGSKSVHWYQQKPGQAPVLVIYYDSDRPSGIPERFSGSNSGNTATLTISRVEAGDEADYYCQVWDSSSDHYVFGTGTKVTVLGSRGGGGSGGGGSGGGGSLEMAEVQLVETGGGLVQPGGSLRLSCAASGFTFSSYAMSWVRQAPGKGLEWVSAISGSDGSTYYADSVKGRFTISRDNSKNTLYLQMNSLRDEDTAVYYCARSHEANLVGDWWGQGTLVTVSSTSGQAGQHHHHHHGAYPYDVPDYAS

SEQ ID NO: 711 - protein, 244 aa, Artificial Sequence
  source: /note="Description of Artificial Sequence: Synthetic scFv sequence"
SYVLTQPPSVSVAPGKTARITCGGNNIGSKSVHWYQQKPGQAPVLVIYYDSDRPSGIPERFSGSNSGNTATLTISRVEAGDEADYYCQVWDSSSDYVFGTGTKVTVLGSRGGGGSGGGGSGGGGSLEMAEVQLVETGGGLVKPGGSLRLSCAASGFTVSDYYMSWIRQAPGKGLEWISYISGSGNSIYYADSVKGRFTISRDNAKNSLDLQMTSLRAEDTAVYYCARSTKFDYWGQGTLVTVSS

SEQ ID NO: 712 - protein, 269 aa, Artificial Sequence
  source: /note="Description of Artificial Sequence: Synthetic scFv sequence"
SYVLTQPPSVSVAPGKTARITCGGNNIGSKSVHWYQQKPGQAPVLVIYYDSDRPSGIPERFSGSNSGNTATLTISRVEAGDEADYYCQVWDSSSDYVFGTGTKVTVLGSRGGGGSGGGGSGGGGSLEMAEVQLVETGGGLVKPGGSLRLSCAASGFTVSDYYMSWIRQAPGKGLEWISYISGSGNSIYYADSVKGRFTISRDNAKNSLDLQMTSLRAEDTAVYYCARSTKFDYWGQGTLVTVSSTSGQAGQHHHHHHGAYPYDVPDYAS

SEQ ID NO: 713 - protein, 270 aa, Artificial Sequence
  source: /note="Description of Artificial Sequence: Synthetic scFv sequence"
SYVLTQPPSVSVAPGKTARITCGGNNIGSKSVHWYQQKPGQAPVLVVYDDSDRPSGIPERFSGSNSGNTATLSISRVEAGDEADYYCQVWDSSSDHTVFGTGTKVTVLGSRGGGGSGGGGSGGGGSLEMAQVQLQQWGAGLLKPSETLSLTCAVYGGSFSGYYWSWIRQPPGKGLEWIGEINHSGSTNYNPSLKSRVTISVDTSKNQFSLKLSSVTAADTAVYYCARYYPGMDMWGQGTLVTVSSTSGQAGQHHHHHHGAYPYDVPDYAS

SEQ ID NO: 714 - protein, 244 aa, Artificial Sequence
  source: /note="Description of Artificial Sequence: Synthetic scFv sequence"
SYVLTQPPSVSVAPGKTARITCGGNNIGSKSVHWYQQKPGQAPVLVVYDDSDRPSGIPERFSGSNSGNTATLSISRVEAGDEADYYCQVWDSSSDHTVFGTGTKVTVLGSRGGGGSGGGGSGGGGSLEMAQVQLQQWGAGLLKPSETLSLTCAVYGGSFSGYYWSWIRQPPGKGLEWIGEINHSGSTNYNPSLKSRVTISVDTSKNQFSLLSSVTAADTAVYYCARYYPGMDMWGQGTLVTVSS

SEQ ID NO: 715 - protein, 248 aa, Artificial Sequence
  source: /note="Description of Artificial Sequence: Synthetic scFv sequence"
SYVLTQPPSVSVAPGKTARITCGGNNIGSKSVHWYQQKPGQAPVVVIHYDSDRPSGIPERFSGSNSGNTATLTISRVEAGDEADYYCQVWDSSSDHPYVFGTGTKVTVLGSRGGGGSGGGGSGGGGSLEMAEVQLVQSGAEVKKPGASVKVSCKASGYTFTTYGISWVRQAPGQGLEWMGWINTYNGHTNYAQKLQGRATMTADTSTNTAYMELRSLRSDDTAVYYCARVIYGSGDYWGQGTLVTVSS

SEQ ID NO: 716 - protein, 273 aa, Artificial Sequence
  source: /note="Description of Artificial Sequence: Synthetic scFv sequence"
SYVLTQPPSVSVAPGKTARITCGGNNIGSKSVHWYQQKPGQAPVVVIHYDSDRPSGIPERFSGSNSGNTATLTISRVEAGDEADYYCQVWDSSSDHPYVFGTGTKVTVLGSRGGGGSGGGGSGGGGSLEMAEVQLVQSGAEVKKPGASVKVSCKASGYTFTTYGISWVRQAPGQGLEWMGWINTYNGHTNYAQKLQGRATMTADTSTNTAYMELRSLRSDDTAVYYCARVIYGSGDYWGQGTLVTVSSTSGQAGQHHHHHHGAYPYDVPDYAS

SEQ ID NO: 717 - protein, 251 aa, Artificial Sequence
  source: /note="Description of Artificial Sequence: Synthetic scFv sequence"
SYVLTQPPSVSVSPGQTASITCSGDRLTNKYVSWYQQKPGQSPVLVIYEDAKRPSGIPARFSGSNSGNTATLTISGTQAMDESEYYCQAWDSSVVVFGGGTKLTVLGSRGGGGSGGGGSGGGGSLEMAEVQLVESGGGLVQPGRSLRLSCAASGFTFDDYAMHWVRQAPGKGLEWVSGISWNSGSIGYADSVKGRFTISRDNAKNSLYLQMNSLRDEDTALYYCAKDRGGGVIVKDAFDIWGQGTMVTVSS

SEQ ID NO: 718 - protein, 276 aa, Artificial Sequence
  source: /note="Description of Artificial Sequence: Synthetic scFv sequence"
SYVLTQPPSVSVSPGQTASITCSGDRLTNKYVSWYQQKPGQSPVLVIYEDAKRPSGIPARFSGSNSGNTATLTISGTQAMDESEYYCQAWDSSVVVFGGGTKLTVLGSRGGGGSGGGGSGGGGSLEMAEVQLVESGGGLVQPGRSLRLSCAASGFTFDDYAMHWVRQAPGKGLEWVSGISWNSGSIGYADSVKGRFTISRDNAKNSLYLQMNSLRDEDTALYYCAKDRGGGVIVKDAFDIWGQGTMVTVSSTSGQAGQHHHHHHGAYPYDVPDYAS

SEQ ID NO: 719 - protein, 256 aa, Artificial Sequence
  source: /note="Description of Artificial Sequence: Synthetic scFv sequence"
SRAAQPAMAQVQLQQSGAELVKPGASVKISCKASGYSFTGYFMNWVKQSHGKSLEWIGRIHPYDGDTFYNQNFKDKATLTVDKSSNTAHMELLSLTSEDFAVYYCTRYDGSRAMDYWGQGTTVTVSSGGGGSGGGGSGGGGSDIELTQSPASLAVSLGQRAIISCKASQSVSFAGTSLMHWYHQKPGQQPKLLIYRASNLEAGVPTRFSGSGSKTDFTLNIHPVEEEDAATYYCQQSREYPYTFGGGTKLEIKRAA

SEQ ID NO: 720 - protein, 504 aa, Artificial Sequence
  source: /note="Description of Artificial Sequence: Synthetic scFv sequence"
QVQLQESGPGLVKPSQTLSLTCTVSGGSISSGAYYWTWIRQHPGKGLEWIGYIYYSGSTYYNPSLKSRVSISIDTSKNQFSLKLSSVTAADTAVYYCARGSSSWFDYWGQGTLVTVSSGGGGSGGGGSGGGGSQSVLTQPPSVSEAPRQRVTISCSGSSSNIGNNAVNWYQQLPGKAPKLLIYYDDMLSSGVSDRFSGSKSGTSASLAISGLQSEDEADYYCAAWDDSLNGVVFGGGTKLTVLSGGGGSEVQLVESGGGLVQPGGSLKLSCAASGFTFNKYAMNWVRQAPGKGLEWVARIRSKYNNYATYYADSVKDRFTISRDDSKNTAYLQMNNLKTEDTAVYYCVRHGNFGNSYISYWAYWGQGTLVTVSSGGGGSGGGGSGGGGSQTVVTQEPSLTVSPGGTVTLTCGSSTGAVTSGNYPNWVQQKPGQAPRGLIGGTKFLAPGTPARFSGSLLGGKAALTLSGVQPEDEAEYYCVLWYSNRWVFGGGTKLTVLHHHHHH

SEQ ID NO: 721 - protein, 225 aa, Artificial Sequence
  source: /note="Description of Artificial Sequence: Synthetic scFv sequence"
EVQLQQSGPELVKPGASVKISCKASGYTFTDYYMNWVKQSHGKSLEWIGDINPNNGGTSYNQKFKGKATLTVDKSSSTAYMELRSLTSEDSAVYYCATYGLGGYWGQGTTLTVSSGNIVMTQSPKSMSMSVGERVTLTCKASENVVTYVSWYQQKPEQSPKLLIYGASNRYTGVPDRFTGSGSATDFTLTISSVQAEDLADYHCGQGYSYPYTFGGGTKLEVKKA

SEQ ID NO: 722 - protein, 248 aa, Artificial Sequence
  source: /note="Description of Artificial Sequence: Synthetic scFv sequence"
HMQVQLQQPGAELVKPGASVKLSCKASGYTFTRYWMHWVRQRPGQGLEWIGEINPMDSRTNYNKKFKSKATLTVDKSSSTAYMQLSSLKSEDSAVYYCARPGRARGMDYWGQGNSVTVSSGGGGSGGGGSGGGGSGNIVLTQSPASLAVSLGQRAIISCLYGESVESYGNNFMHWYQQKPGQAPKLLIYLASNLESGVPARFSGSGSRTDFTLTIDPVEADDAATYYCQQNNEDPTFGGGTKLEIKKA

SEQ ID NO: 723 - protein, 244 aa, Artificial Sequence
  source: /note="Description of Artificial Sequence: Synthetic scFv sequence"
MEVQLVESGGGLVKPGGSLKLSCAASGFTFSSYAMSWARQTPEKRLEWVATISDGGYYTYYPDNVKGRFTISRDNAKNNLYLQMSHLKSGDTAMYYCARYDSFDYWGQGTTLTVSSGGGGSGGGGSRGGGSGDIVLTQSPASLAVSLGQRATISYRASKSVSTSGYSYMHWNQQKPGQPPRLLIYLVSNLESGVPARFSGSGSGTDFTLNIHPVEEEDAATYYCQHIRELTTFGGGTKLEIKKA

SEQ ID NO: 724 - protein, 230 aa, Artificial Sequence
  source: /note="Description of Artificial Sequence: Synthetic scFv sequence"
MQVQLQQPGAELVKPGASVKLSCKASGYTFTRYWMHWVRQRPGQGLEWIGEINPSNGRTNYNEKFKSKATLTVDKSSSTAYMQLSSLKSEDSAVYYCARPGRARGMDYWGQGNSVTVSSGNIVLTQSPASLAVSLGQRATISCRASESVESYGNNFMHWYQQKPGQAPKLLIYLASNLESGVPARFSGSGSRTDFTLTIDPVEADDAATYYCQQNNEDPTFGGGTKLEIK

SEQ ID NO: 725 - protein, 237 aa, Artificial Sequence
  source: /note="Description of Artificial Sequence: Synthetic scFv sequence"
QAVVTQEPSLTVSPGGTVTLTCGSSTGAVTTSNYASWVQQKPDHLFRGLIGGTNNRAPGVPARFSGSLLGGKAALTISGAQPEDEAEYYCVLWYSDHWVFGGGTKLTVLGGGGSGGGGSGGGGSQVQLQESGPGLVKPSETLSITCTVSGFLLTDYGVNWVRQPPGKGLEWLGVLWGDGITDYNPSLKSRLTVSKDTSKNQVSLKMSSLTAADTAVYYCVTGLFDYWGQGTLLTVSS

SEQ ID NO: 726 - protein, 237 aa, Artificial Sequence
  source: /note="Description of Artificial Sequence: Synthetic scFv sequence"
QAVVTQEPSLTVSPGGTVTLTCGSSTGAVTTSNYASWVQQKPDHLFRGLIGGTNNRAPGVPARFSGSLLGGKAALTISGAQPEDEAEYYCVLWYSDHWVFGGGTKLTVLGGGGSGGGGSGGGGSQVQLQESGPGLVKPSETLSLTCTVSGFLLTDYGVNWLRQPPGKGLEWIGVLWGDGITDYNPSLKSRVTISKDTSKNQFSLKLSSVTAADTAVYYCVTGLFDYWGQGTLVTVSS

SEQ ID NO: 727 - protein, 237 aa, Artificial Sequence
  source: /note="Description of Artificial Sequence: Synthetic scFv sequence"
QAVVTQEPSLTVSPGGTVTLTCGSSTGAVTTSNYASWVQQKPGQAFRGLIGGTNNRAPGVPARFSGSLLGGKAALTISGAQPEDEAEYYCVLWYSDHWVFGGGTKLTVLGGGGSGGGGSGGGGSQVQLQESGPGLVKPSETLSITCTVSGFLLTDYGVNWVRQPPGKGLEWLGVLWGDGITDYNPSLKSRLTVSKDTSKNQVSLKMSSLTAADTAVYYCVTGLFDYWGQGTLLTVSS

SEQ ID NO: 728 - protein, 237 aa, Artificial Sequence
  source: /note="Description of Artificial Sequence: Synthetic scFv sequence"
QAVVTQEPSLTVSPGGTVTLTCGSSTGAVTTSNYASWVQQKPGQAFRGLIGGTNNRAPGVPARFSGSLLGGKAALTISGAQPEDEAEYYCVLWYSDHWVFGGGTKLTVLGGGGSGGGGSGGGGSQVQLQESGPGLVKPSETLSLTCTVSGFLLTDYGVNWLRQPPGKGLEWIGVLWGDGITDYNPSLKSRVTISKDTSKNQFSLKLSSVTAADTAVYYCVTGLFDYWGQGTLVTVSS

SEQ ID NO: 729 - protein, 237 aa, Artificial Sequence
  source: /note="Description of Artificial Sequence: Synthetic scFv sequence"
QAVVTQEPSLTVSPGGTVTLTCGSSTGAVTTSNYASWVQQKPGQAPRGLIGGTNNRAPGVPARFSGSLLGGKAALTISGAQPEDEAEYYCVLWYSDHWVFGGGTKLTVLGGGGSGGGGSGGGGSQVQLQESGPGLVKPSETLSITCTVSGFLLTDYGVNWVRQPPGKGLEWLGVLWGDGITDYNPSLKSRLTVSKDTSKNQVSLKMSSLTAADTAVYYCVTGLFDYWGQGTLLTVSS

SEQ ID NO: 730 - protein, 237 aa, Artificial Sequence
  source: /note="Description of Artificial Sequence: Synthetic scFv sequence"
QAVVTQEPSLTVSPGGTVTLTCGSSTGAVTTSNYASWVQQKPGQAPRGLIGGTNNRAPGVPARFSGSLLGGKAALTISGAQPEDEAEYYCVLWYSDHWVFGGGTKLTVLGGGGSGGGGSGGGGSQVQLQESGPGLVKPSETLSLTCTVSGFLLTDYGVNWLRQPPGKGLEWIGVLWGDGITDYNPSLKSRVTISKDTSKNQFSLKLSSVTAADTAVYYCVTGLFDYWGQGTLVTVSS

SEQ ID NO: 731 - protein, 239 aa, Artificial Sequence
  source: /note="Description of Artificial Sequence: Synthetic scFv sequence"
EIVMTQTPATLSVSAGERVTITCKASQSVSNDVTWYQQKPGQAPRLLIYSASNRYSGVPARFSGSGYGTEFTFTISSVQSEDFAVYFCQQDYSSFGQGTKLEIKRGGGGSGGGGSGGGGSQVQLVESGPGVVQPGRSLRISCAVSGFSVTNYGVHWVRQPPGKGLEWLGVIWAIGITNYNSAFMSRLTISKDNSKNTVYLQMNSLRAEDTAMYYCASRGGHYGYALDYWGQGTLVTVSS

SEQ ID NO: 732 - protein, 524 aa, Artificial Sequence
  source: /note="Description of Artificial Sequence: Synthetic scFv sequence"
EIVMTQTPATLSVSAGERVTITCKASQSVSNDVTWYQQKPGQAPRLLIYSASNRYSGVPARFSGSGYGTEFTFTISSVQSEDFAVYFCQQDYSSFGQGTKLEIKRTVAAPSVFIFPPSDEQLKSGTASVVCLLNNFYPREAKVQWKVDNALQSGNSQESVTEQDSKDSTYSLSSTLTLSKADYEKHKVYACEVTHQGLSSPVTKSFNRGECGGGGSGGGGSASHVKLQESGPLTLSKADYEKHKVYACEVTHQGLSSPVTKSFNRGECGGGGSGGGGSASHVKLQESGPGLVQPSQSLSLTCTVSGFSLTDYGVHWVRQSPGKGLEWLGVIWSGGGTAYNTALISRLNIYRDNSKNQVFLEMNSLQAEDTAMYYCARRGSYPYNYFDAWGCGTTVTVSSGGGGSGGGGSGGGGSQAVVIQESALTTPPGETVTLTCGSSTGAVTASNYANWVQEKPDHCFTGLIGGHNNRPPGVPARFSGSLIGDKAALTIAGTQTEDEAIYFCALWYSDHWVIGGGTRLTVLG

SEQ ID NO: 733 - protein, 518 aa, Artificial Sequence
  source: /note="Description of Artificial Sequence: Synthetic scFv sequence"
EIVMTQTPATLSVSAGERVTITCKASQSVSNDVTWYQQKPGQAPRLLIYSASNRYSGVPARFSGSGYGTEFTFTISSVQSEDFAVYFCQQDYSSFGQGTKLEIKRTVAAPSVFIFPPSDEQLKSGTASVVCLLNNFYPREAKVQWKVDNALQSGNSQESVTEQDSKDSTYSLSSTLTLSKADYEKHKVYACEVTHQGLSSPVTKSFNRGECGGGGSGGGGSQVQLVQSGGGLTLSKADYEKHKVYACEVTHQGLSSPVTKSFNRGECGGGGSGGGGSQVQLVQSGGGVVQPGRSLRLSCKASGYTFTRYTMHWVRQAPGKCLEWIGYINPSRGYTNYNQKFKDRFTISRDNSKNTAFLQMDSLRPEDTGVYFCARYYDDHYCLDYWGQGTPVTVSSGGGGSGGGGSGGGGSDIQMTQSPSSLSASVGDRVTITCSASSSVSYMNWYQQTPGKAPKRWIYDTSKLASGVPSRFSGSGSGTDYTFTISSLQPEDIATYYCQQWSSNPFTFGCGTKLQITR

SEQ ID NO: 734 - protein, 239 aa, Artificial Sequence
  source: /note="Description of Artificial Sequence: Synthetic scFv sequence"
EIVMTQTPATLSVSAGERVTITCKASQSVSNHVTWYQQKPGQAPRLLIYSASNRYSGVPARFSGSGYGTEFTFTISSVQSEDFAVYFCQQDYSSFGQGTKLEIKRGGGGSGGGGSGGGGSQVQLVESGPGVVQPGRSLRISCAVSGFSVTNYGVHWVRQPPGKGLEWLGVIWAGGITNYNSAFMSRLTISKDNSKNTVYLQMNSLRAEDTAMYYCASRGGHYGYALDYWGQGTLVTVSS

SEQ ID NO: 735 - protein, 239 aa, Artificial Sequence
  source: /note="Description of Artificial Sequence: Synthetic scFv sequence"
EIVMTQTPATLSVSAGERVTITCKASQSVSNHVTWYQQKPGQAPRLLIYSASNRYSGVPARFSGSGYGTEFTFTISSVQSEDFAVYFCQQDYSSFGQGTKLEIKRGGGGSGGGGSGGGGSQVQLVESGPGVVQPGRSLRISCAVSGFSVTNYGVHWVRQPPGKGLEWLGVIWAIGITNYNSAFMSRLTISKDNSKNTVYLQMNSLRAEDTAMYYCASRGGHYGYALDYWGQGTLVTVSS

SEQ ID NO: 736 - protein, 239 aa, Artificial Sequence
  source: /note="Description of Artificial Sequence: Synthetic scFv sequence"
EIVMTQTPATLSVSAGERVTITCRASQSVSNDVTWYQQKPGQAPRLLIYSASNRYTGIPARFSGSGYGTEFTFTISSVQSEDFAVYFCQQDYSSFGQGTKLEIKRGGGGSGGGGSGGGGSQVQLVESGPGVVQPGRSLRLSCAVSGFSVTNYGVHWVRQPPGKGLEWLGVIWAGGITNYNSSVKGRLTISKDNSKNTVYLQMNSLRAEDTAVYYCASRGGHYGYALDYWGQGTLVTVSS

SEQ ID NO: 737 - protein, 239 aa, Artificial Sequence
  source: /note="Description of Artificial Sequence: Synthetic scFv sequence"
EIVMTQTPATLSVSAGERVTITCRASQSVSNDVTWYQQKPGQAPRLLIYSASNRYTGIPARFSGSGYGTEFTFTISSVQSEDFAVYFCQQDYSSFGQGTKLEIKRGGGGSGGGGSGGGGSQVQLVESGPGVVQPGRSLRLSCAVSGFSVTNYGVHWVRQPPGKGLEWLGVIWAIGITNYNSSVKGRLTISKDNSKNTVYLQMNSLRAEDTAVYYCASRGGHYGYALDYWGQGTLVTVSS

SEQ ID NO: 738 - protein, 239 aa, Artificial Sequence
  source: /note="Description of Artificial Sequence: Synthetic scFv sequence"
EIVMTQTPATLSVSAGERVTITCRASQSVSNHVTWYQQKPGQAPRLLIYSASNRYTGIPARFSGSGYGTEFTFTISSVQSEDFAVYFCQQDYSSFGQGTKLEIKRGGGGSGGGGSGGGGSQVQLVESGPGVVQPGRSLRLSCAVSGFSVTNYGVHWVRQPPGKGLEWLGVIWAGGITNYNSSVKGRLTISKDNSKNTVYLQMNSLRAEDTAVYYCASRGGHYGYALDYWGQGTLVTVSS

SEQ ID NO: 739 - protein, 239 aa, Artificial Sequence
  source: /note="Description of Artificial Sequence: Synthetic scFv sequence"
EIVMTQTPATLSVSAGERVTITCRASQSVSNHVTWYQQKPGQAPRLLIYSASNRYTGIPARFSGSGYGTEFTFTISSVQSEDFAVYFCQQDYSSFGQGTKLEIKRGGGGSGGGGSGGGGSQVQLVESGPGVVQPGRSLRLSCAVSGFSVTNYGVHWVRQPPGKGLEWLGVIWAIGITNYNSSVKGRLTISKDNSKNTVYLQMNSLRAEDTAVYYCASRGGHYGYALDYWGQGTLVTVSS

SEQ ID NO: 740 - protein, 249 aa, Artificial Sequence
  source: /note="Description of Artificial Sequence: Synthetic scFv sequence"
EVKLVESGGGLVLPGDSLRLSCATSEFTFTDYYMTWVRQPPRKALEWLGFIRNRANGYTTEYNPSVKGRFTISRDNSQSILYLQMNTLRTEDSATYYCARVSNWAFDYWGQGTTLTVSSGSTSGSGKPGSSEGSTKGDVVMTQTPLSLPVSLGDQASISCRSSQSLLKNNGNTFLHWYLQKSGQSPKLLIYKVSNRLSGVPDRFSGSGSGTYFTLKISRVEAEDLGVYFCSQSTHIPYTFGGGTKLEIK

SEQ ID NO: 741 - protein, 244 aa, Artificial Sequence
  source: /note="Description of Artificial Sequence: Synthetic scFv sequence"
EVQLVQSGAEVEKPGASVKISCKASGSSFTGYNMNWVRQNIGKSLEWIGAIDPYYGGTSYNQKFKGRATLTVDKSTSTAYMHLKSLRSEDTAVYYCVSGMEYWGQGTSVTVSSGSTSGSGKPGSSEGSTKGDVVMTQTPLSLPVTPGEPASISCRSSQSLVHRNGNTYLHWYLQKPGQSPKLLIHKVSNRFSGVPDRFSGSGSGTDFTLKISRVEAEDLGVYFCSQSTHVPPLTFGAGTKLELK

SEQ ID NO: 742 - protein, 239 aa, Artificial Sequence
  source: /note="Description of Artificial Sequence: Synthetic scFv sequence"
KIVMTQTPATLSVSAGERVTITCKASQSVSNDVTWYQQKPGQAPRLLIYSASNRYSGVPARFSGSGYGTEFTFTISSVQSEDFAVYFCQQDYSSFGQGTKLEIKRGGGGSGGGGSGGGGSQVQLVESGPGVVQPGRSLRISCAVSGFSVTNYGVHWVRQPPGKGLEWLGVIWAGGITNYNSAFMSRLTISKDNSKNTVYLQMNSLRAEDTAMYYCASRGGHYGYALDYWGQGTLVTVSS

SEQ ID NO: 743 - protein, 239 aa, Artificial Sequence
  source: /note="Description of Artificial Sequence: Synthetic scFv sequence"
KIVMTQTPATLSVSAGERVTITCKASQSVSNDVTWYQQKPGQAPRLLIYSASNRYSGVPARFSGSGYGTEFTFTISSVQSEDFAVYFCQQDYSSFGQGTKLEIKRGGGGSGGGGSGGGGSQVQLVESGPGVVQPGRSLRISCAVSGFSVTNYGVHWVRQPPGKGLEWLGVIWAIGITNYNSAFMSRLTISKDNSKNTVYLQMNSLRAEDTAMYYCASRGGHYGYALDYWGQGTLVTVSS

SEQ ID NO: 744 - protein, 239 aa, Artificial Sequence
  source: /note="Description of Artificial Sequence: Synthetic scFv sequence"
KIVMTQTPATLSVSAGERVTITCKASQSVSNHVTWYQQKPGQAPRLLIYSASNRYSGVPARFSGSGYGTEFTFTISSVQSEDFAVYFCQQDYSSFGQGTKLEIKRGGGGSGGGGSGGGGSQVQLVESGPGVVQPGRSLRISCAVSGFSVTNYGVHWVRQPPGKGLEWLGVIWAGGITNYNSAFMSRLTISKDNSKNTVYLQMNSLRAEDTAMYYCASRGGHYGYALDYWGQGTLVTVSS

SEQ ID NO: 745 - protein, 239 aa, Artificial Sequence
  source: /note="Description of Artificial Sequence: Synthetic scFv sequence"
KIVMTQTPATLSVSAGERVTITCKASQSVSNHVTWYQQKPGQAPRLLIYSASNRYSGVPARFSGSGYGTEFTFTISSVQSEDFAVYFCQQDYSSFGQGTKLEIKRGGGGSGGGGSGGGGSQVQLVESGPGVVQPGRSLRISCAVSGFSVTNYGVHWVRQPPGKGLEWLGVIWAIGITNYNSAFMSRLTISKDNSKNTVYLQMNSLRAEDTAMYYCASRGGHYGYALDYWGQGTLVTVSS

SEQ ID NO: 746 - protein, 239 aa, Artificial Sequence
  source: /note="Description of Artificial Sequence: Synthetic scFv sequence"
KIVMTQTPATLSVSAGERVTITCRASQSVSNDVTWYQQKPGQAPRLLIYSASNRYTGIPARFSGSGYGTEFTFTISSVQSEDFAVYFCQQDYSSFGQGTKLEIKRGGGGSGGGGSGGGGSQVQLVESGPGVVQPGRSLRLSCAVSGFSVTNYGVHWVRQPPGKGLEWLGVIWAGGITNYNSSVKGRLTISKDNSKNTVYLQMNSLRAEDTAVYYCASRGGHYGYALDYWGQGTLVTVSS

SEQ ID NO: 747 - protein, 239 aa, Artificial Sequence
  source: /note="Description of Artificial Sequence: Synthetic scFv sequence"
KIVMTQTPATLSVSAGERVTITCRASQSVSNDVTWYQQKPGQAPRLLIYSASNRYTGIPARFSGSGYGTEFTFTISSVQSEDFAVYFCQQDYSSFGQGTKLEIKRGGGGSGGGGSGGGGSQVQLVESGPGVVQPGRSLRLSCAVSGFSVTNYGVHWVRQPPGKGLEWLGVIWAIGITNYNSSVKGRLTISKDNSKNTVYLQMNSLRAEDTAVYYCASRGGHYGYALDYWGQGTLVTVSS

SEQ ID NO: 748 - protein, 100 aa, Artificial Sequence
  source: /note="Description of Artificial Sequence: Synthetic scFv sequence"
KIVMTQTPATLSVSAGERVTITCRASQSVSNHVTWYQQKPGQAPRLLIYSASNRYTGIPARFSGSGYGTEFTFTISSVQSEDFAVYFCQQDYSSFGQGTK

SEQ ID NO: 749 - protein, 239 aa, Artificial Sequence
  source: /note="Description of Artificial Sequence: Synthetic scFv sequence"
KIVMTQTPATLSVSAGERVTITCRASQSVSNHVTWYQQKPGQAPRLLIYSASNRYTGIPARFSGSGYGTEFTFTISSVQSEDFAVYFCQQDYSSFGQGTKLEIKRGGGGSGGGGSGGGGSQVQLVESGPGVVQPGRSLRLSCAVSGFSVTNYGVHWVRQPPGKGLEWLGVIWAGGITNYNSSVKGRLTISKDNSKNTVYLQMNSLRAEDTAVYYCASRGGHYGYALDYWGQGTLVTVSS

SEQ ID NO: 750 - protein, 139 aa, Artificial Sequence
  source: /note="Description of Artificial Sequence: Synthetic scFv sequence"
LEIKRGGGGSGGGGSGGGGSQVQLVESGPGVVQPGRSLRLSCAVSGFSVTNYGVHWVRQPPGKGLEWLGVIWAIGITNYNSSVKGRLTISKDNSKNTVYLQMNSLRAEDTAVYYCASRGGHYGYALDYWGQGTLVTVSS

SEQ ID NO: 751 - protein, 243 aa, Artificial Sequence
  source: /note="Description of Artificial Sequence: Synthetic scFv sequence"
QVQLKESGPVLVAPSQTLSITCTVSGFSLASYNIHVWRQPPGKGLEWLGVIWAGGSTNYNSALMSRLSISKDNSKSQVFLQMNSLQTDDTAMYYCAKRSDDYSWFAYWGQGTLVTVSASGGGGSGGGGSGGGGSENVLTQSPAIMSASPGEKVTMTCRASSSVSSSYLHWYQQKSGASPKVWIYSTSNLASGVPGRFSGSGSGTSYSLTISSVEAEDAATYYCQQYSGYPITFGAGTKVEVKR

SEQ ID NO: 752 - protein, 243 aa, Artificial Sequence
  source: /note="Description of Artificial Sequence: Synthetic scFv sequence"
QVQLKESGPVLVAPSQTLSITCTVSGFSLASYNIHWVRQPPGKGLEWLGVIWAGGSTNYNSALMSRLSISKDNSKSQVFLQMNSLQTDDTAMYYCAKRSDDYSWFAYWGQGTLVTVSASGGGGSGGGGSGGGGSENVLTQSPAIMSASPGEKVTMTCRASSSVSSSYLHWYQQKSGASPKVWIYSTSNLASGVPGRFSGSGSGTSYSLTISSVEAEDAATYYCQQYSGYPITFGAGTKVEVKR

SEQ ID NO: 753 - protein, 242 aa, Artificial Sequence
  source: /note="Description of Artificial Sequence: Synthetic scFv sequence"
QVQLQESGPGLVKPSQTLSITCTVSGFSLASYNIHWVRQPPGKGLEWLGVIWAGGSTNYNSALMSRLTISKDNSKNQVFLKMSSLTAADTAVYYCAKRSDDYSWFAYWGQGTLVTVSSGGGGSGGGGSGGGGSENQMTQSPSSLSASVGDRVTMTCRASSSVSSSYLHWYQQKSGKAPKVWIYSTSNLASGVPSRFSGSGSGTDYTLTISSLQPEDFATYYCQQYSGYPITFGQGTKVEIKR

SEQ ID NO: 754 - protein, 241 aa, Artificial Sequence
  source: /note="Description of Artificial Sequence: Synthetic scFv sequence"
QVQLQESGPGLVKPSQTLSITCTVSGFSLASYNIHWVRQPPGKGLEWLGVIWAGGSTNYNSALMSRLTISKDNSKNQVFLKMSSLTAADTAVYYCAKRSDDYSWFAYWGQTLVTVSSGGGGSGGGGSGGGGSENQMTQSPSSLSASVGDRVTMTCRASSSVSSSYLHWYQQKSGKAPKVWIYSTSNLASGVPSRFSGSGSGTDYTLTISSLQPEDFATYYCQQYSGYPITFGQGTKVEIKR

SEQ ID NO: 755 - protein, 241 aa, Artificial Sequence
  source: /note="Description of Artificial Sequence: Synthetic scFv sequence"
QVQLVESGPGVVQPGRSLRISCAVSGFSVTNYGVHWVRQPPGKGLEWLGVIWAGGITNYNSAFMSRLTISKDNSKNTVYLQMNSLRAEDTAMYYCASRGGHYGYALDYWGQGTLVTVSSGSTSGSGKPGSSEGSTKGEIVMTQTPATLSVSAGERVTITCKASQSVSNDVTWYQQKPGQAPRLLIYSASNRYSGVPARFSGSGYGTEFTFTISSVQSEDFAVYFCQQDYSSFGQGTKLEIK

SEQ ID NO: 756 - protein, 239 aa, Artificial Sequence
  source: /note="Description of Artificial Sequence: Synthetic scFv sequence"
EVQLLESGGGLVQPGGSLRLSCAASGFTFSSYAMSWVRQAPGKGLEWVSTIQKQGLPTEYADSVKGRFTISRDNSKNTLYLQMNSLRAEDTAVYYCAKNRAKFDYWGQGTLVTVSSGGGGSGGGGSGGGGSTDIQMTQSPSSLSASVGDRVTITCRASQSISSYLNWYQQKPGKAPKLLIYNASMLQSGVPSRFSGSGSGTDFTLTISSLQPEDFATYYCQQNRGFPLTFGQGTKVEIK

SEQ ID NO: 757 - protein, 261 aa, Artificial Sequence
  source: /note="Description of Artificial Sequence: Synthetic scFv sequence"
MDWIWRILFLVGAATGAHSQVQLQQSGAELVRPGASVKLSCKASGYTFTDYEMHWVKQTPVHGLKWIGALDPKTGDTAYSQKFKGKATLTADKSSSTAYMELRSLTSEDSAVYYCTRFYSYTYWGQGTLVTVSAGGGGSGGGGSGGGGSDVVMTQTPLSLPVSLGDQASISCRSSQSLVHSNGNTYLHWYLQKPGQSPKLLIYKVSNRFSGVPDRFSGSGSGTDFTLKISRVEAEDLGVYFCSQNTHVPPTFGSGTKLEIK

SEQ ID NO: 758 - protein, 242 aa, Artificial Sequence
  source: /note="Description of Artificial Sequence: Synthetic scFv sequence"
QVQLQQSGAELVRPGASVKLSCKASGYTFTDYEMHWVKQTPVHGLKWIGALDPKTGDTAYSQKFKGKATLTADKSSSTAYMELRSLTSEDSAVYYCTRFYSYTYWGQGTLVTVSAGGGGSGGGGSGGGGSDVVMTQTPLSLPVSLGDQASISCRSSQSLVHSNGNTYLHWYLQKPGQSPKLLIYKVSNRFSGVPDRFSGSGSGTDFTLKISRVEAEDLGVYFCSQNTHVPPTFGSGTKLEIK

SEQ ID NO: 759 - protein, 248 aa, Artificial Sequence
  source: /note="Description of Artificial Sequence: Synthetic scFv sequence"
DIQLTQSPSSLSASVGDRVTITCRASQSISSYLNWYQQKPGKAPKLLIYAASSLQSGVPSRFSGSGSGTDFTLTISSLQPADFATYYCQQSYSVPYTFGQGTKLEIKRSRGGGGSGGGGSGGGGSLEMAEVQLVQSGGGLVQPGGSLRLSCATSGFTFNNYWMSWVRQAPGKGLEWVANIKQDGSEKYYADSVRGRFTISRDNAKNSLSLQLNNLRAEDTAVYYCARSMSTAWGYDEWGQGTLVTVSS

SEQ ID NO: 760 - protein, 269 aa, Artificial Sequence
  source: /note="Description of Artificial Sequence: Synthetic scFv sequence"
MKKTAIAIAVALAGFATVAQAAELQAVLTQPPSASGTPGQRVTISCSGSSSNIGSNYVYWYQQLPGTAPKLLIYRNNQRPSGVPDRFSGSKSGTSASLAISGLRSEDEADYYCAAWDDSLSGRVFGTGTKVTVLGSRGGGGSGGGGSGGGGSLEMAQLQLVQSGAEVKKPGSSVKVSCKASGYTFNTYYLHWVRQAPGQGLEWMGRINPNNGGTNYAQKFQGRVTMTRDTSINTAYMELSRLRSDDTAVYYCARSYDYWGQGTLVTVSS

SEQ ID NO: 761 - protein, 276 aa, Artificial Sequence
  source: /note="Description of Artificial Sequence: Synthetic scFv sequence"
MKKTAIAIAVALAGFATVAQAAELQPVLTQPPSASGTPGQRVTISCSGSSSNIGGNTVSWYQQVPGTAPRLLIFRNNQRPPGVPDRFSGSKSGTSASLAISGLRSEDEADYYCAAWDASRQGVFGGGTKLTVLGSRGGGGSGGGGSGGGGSLEMAQVQLVQSGAEVKKPGSSVKVSCKASGGTFRSYAITWVRQAPGQGLEWMGRIIPMLDITNYAQKFQGRVTITADKSTSTAYMELSSLRSEDTAVYYCARTYSRSPFHMEDFWGQGTLVTVSS

SEQ ID NO: 762 - protein, 271 aa, Artificial Sequence
  source: /note="Description of Artificial Sequence: Synthetic scFv sequence"
MKKTAIAIAVALAGFATVAQAAELQSALTQPPSASGSPGQSVTISCTGTSRDAGGYNYFSWYQQHPGKAPKLLIYEVTKRPSGVPDRFSGSKSGKTASLTVSGLQADDEAVYYCSSYGGSNNFRVFGGGTKLTVLGSRGGGGSGGGGSGGGGSLEMAEVQLVESGGGVVRPGGSLRLSCAASGFTFGDYGMSWVRQAPGKGLEWVSGINWNGGSTGYADSVKGRFTISRDNAKNSLYLQMNSLRAEDTAVYYCARSKQDYWGQGTLVTVSS

SEQ ID NO: 763 - protein, 273 aa, Artificial Sequence
  source: /note="Description of Artificial Sequence: Synthetic scFv sequence"
MKKTAIAIAVALAGFATVAQAAELQSVLTQPPSASGSPGQSLTISCTGTSSDVGGYNHVSWYQQYPGKAPKLMIYEVTKRPSGVPDRFSGSKSGNTASLTVSGLQAEDEADYYCSSYAGSAHWVFGGGTKLTVLGSRGGGGSGGGGSGGGGSLEMAEVQLVQSGAEVKKPGASVKVSCKASGYTFSRYYIHWVRQAPGQGLEWMGWMNPNSGNTGYAQKFQGRVTMTRNTSISTAYMELSSLRSEDTAVYYCARGRYHVIDYWGQGTLVTVSS

SEQ ID NO: 764 - protein, 270 aa, Artificial Sequence
  source: /note="Description of Artificial Sequence: Synthetic scFv sequence"
MKKTAIAIAVALAGFATVAQAAELQSVLTQPPSASGTPGQRVTISCSGSSSNIGSNTVNWYQQLPGTAPKLLIYRNNQRPSGVPDRFSGSKSGTSASLAISGLRSEDEADYYCAAWDDSLSGRVFGGGTKLTVLGSRGGGGSGGGGSGGGGSLEMAEVQLVESGGGLVQPGGSLRLSCAASGFTFSSYAMSWVRQAPGKGLEWVSAISGSGGSTYYADSVKGRFTISRDNAKNTLYLQMNSLRAEDTAVYYCARKYQDVWGQGTLVTVSS

SEQ ID NO: 765 - protein, 279 aa, Artificial Sequence
  source: /note="Description of Artificial Sequence: Synthetic scFv sequence"
MKKTAIAIAVALAGFATVAQAAELQSVLTQPPSVSGAPGQRVTISCTGSSSNIGAGYDVHWYQQLPGRAPKLLIYGNSNRPSGVPDRFSGSKSGTSASLAITGLQAEDEADYYCQSYDSSLRGYVFGTGTKVTVLGSRGGGGSGGGGSGGGGSLEMAQVQLVQSGGGVVQPGRSLRLSCAASGFSFSGTAMHWVRQAPGKGLEWVSTISSTGRSTYYRDSVKGRFTISRDNSKNTLYLQMNSLRGEDTAVYYCARPVSSMTLSIQSDGWGQGTLVTVSS

SEQ ID NO: 766 - protein, 286 aa, Artificial Sequence
  source: /note="Description of Artificial Sequence: Synthetic scFv sequence"
MKKTAIAIAVALAGFATVAQAAELQSVVTQPPSVSAAPGQRVTISCSGGSSNIGNNYVSWFQQLPRTAPKLLIYDNNKRPSGIPDRFSGSKSGTSAALDITVLQTGDEADYYCGTWDSSLRNWVFGGGTKLTVLGSRGGGGSGGGGSGGGGSLEMAQMQLVQSGAEVKKPGASVKVSCKASGYTFTSYYMHWVRQAPGQGLEWMGIINPSGGSTSYAQKFQGRVTMTRDTSTSTVYMELSSLRSEDTAVYYCARGQKYHSQYSRGGTGGGMTQDMWGQGTLVTVSS

SEQ ID NO: 767 - protein, 277 aa, Artificial Sequence
  source: /note="Description of Artificial Sequence: Synthetic scFv sequence"
MKKTAIAIAVALAGFATVAQAAELSYELTQPPSASGTPGQRVSISCSGSSSNIGSNTVNWYQQFPGTAPKLLIHSNNQRPSGVPDRFSGSKSGTSASLAISGPQSEDEADYYCAAWDDSVNGYVFGTGTKVTVLGSRGGGGSGGGGSGGGGSLEMAQLQLQESGGGSVQPGGSLRLSCAASGFTFSNYAMSWVRQAPGKGLEWVSAITNSGRSTYYADSVKGRFTISRDNSKNTLSLQMSSLRAEDTAVYYCARVTHRRYGSTFDSRGQGTLVTVSS

SEQ ID NO: 768 - protein, 250 aa, Artificial Sequence
  source: /note="Description of Artificial Sequence: Synthetic scFv sequence"
NFMLTQPHSVSESPGKTVSISCTRTSGAIAGAYVQWFQQRPGSAPTTVIYDDNKRPSGVPDRFSGSIDKSSNSASLTISGLKTEDEADYYCQSYDYDSSNVLFGGGTKLTVLGSRGGGGSGGGGSGGGGSLEMAEVQLVESGGGLVQPGGSLRLSCAASGFTFSNYAMSWVRQAPGKGLEWVSAISGSGNTYYADSVKGRFTISRDNSKNTLYLQMNSLRAEDTAVYYCARGSVRYTDIWGQGTLVTVSS

SEQ ID NO: 769 - protein, 253 aa, Artificial Sequence
  source: /note="Description of Artificial Sequence: Synthetic scFv sequence"
QAVLTQPPSASGTPGQRVTISCSGSSSNIGSNYVYWYQQLPGTAPKLLIYRNNQRPSGVPDRFSGSKSGTSASLAISGLRSEDEADYYCAAWDDSLSGYVFGTGTKVTVLGSRGGGGSGGGGSGGGGSLEMAQVQLVQSGAEVQRPGASVRVSCKAIAYTFTDYYIHWVRQAPGQGPEWMGWINPKSGRTQYAPKFQDRVTLARETPISTASMELRGLTSDDTAVYYCARVYGYSRWSGFDLWGQGTLVTVSS

SEQ ID NO: 770 - protein, 256 aa, Artificial Sequence
  source: /note="Description of Artificial Sequence: Synthetic scFv sequence"
QSALTQPASVSGSPGQSITISCTGTSRDVGGYNYVSWYQQYPGKAPKLMIYEVSKRPSGVSNRFSGSKSGNTASLTISGLQAEDEADYYCSSYTSSSTLDFGTGTKVTVLGSRGGGGSGGGGSGGGGSLEMAQVQLVQSGAEVKQPGASVKVSCQASGYTFTTYYMHWVRQAPGQGLEWMGIINPNGGGTFYAQKFQDRVTMTRDTSTGTVYMELSSLRSDDTAVYYCARGHKVYKSHPTGGYDRWGQGTLVTVSS

SEQ ID NO: 771 - protein, 253 aa, Artificial Sequence
  source: /note="Description of Artificial Sequence: Synthetic scFv sequence"
QSALTQPASVSGSPGQSITISCTGTSSDVGGYNFVSWYQQHPGKAPKVMIYDVSKRPSGISNRFSGSKSGNTASLTISGLQVEDEAEYYCSSYTSTRTVIFAGGTKVTVLGSRGGGGSGGGGSGGGGSLEMAQVQLVQSGAEVKKPGASVKVSCKASGYTFTSYYMHWVRQAPGQGLEWMGIINPSGGSTRYAQKFQGRVTMTRDTSTSTVYMELSSLRSEDTAVYYCARGSSRWGGWTGDYWGQGTLVTVSS

SEQ ID NO: 772 - protein, 259 aa, Artificial Sequence
  source: /note="Description of Artificial Sequence: Synthetic scFv sequence"
QSALTQPASVSGSPGQSITISCTGTSSDVGGYNYVSWYQQHPGKAPKLMIYDVSKRPSGVSNRFSGSKSGNTASLTISGLQAEDEADYYCSSYTRSSTEVFGGGTKLTVLGSRGGGGSGGGGSGGGGSLEMAEVQLVQSGAEVKKPGASVKVSCKASGYTFTSYYMHWVRQAPGQGLEWMGIINPSGGSTSYAQKFQGRVTMTRDTSTSTVYMELSSLRSEDTAVYYCARGGSKKWSGEKWRRENFDYWGQGTLVTVSS

SEQ ID NO: 773 - protein, 249 aa, Artificial Sequence
  source: /note="Description of Artificial Sequence: Synthetic scFv sequence"
QSALTQPASVSGSPGQSITISCTGTSSDVGGYNYVSWYQQSPGKAPRLMIYGVSKRPSGVPDRFSGSKSGNTASLTVSGLQAEDEADYYCSSYAGVNNLMFGGGTKLTVLGSRGGGGSGGGGSGGGGSLEMAQVQLVQSGAEVKKPGASVKVSCKASGYTFTSYYMHWVRQAPGQGLEWMGIINPSGGSTSYAQKFQGRVTMTRDTSTSTVYMELSSLRSEDTAVYYCARDVISGFDSWGQGTLVTVSS

SEQ ID NO: 774 - protein, 247 aa, Artificial Sequence
  source: /note="Description of Artificial Sequence: Synthetic scFv sequence"
QSALTQPPSASGSPGQSVTISCTGTSRDAGGYNYFSWYQQHPGKAPKLLIYEVTKRPSGVPDRFSGSKSGKTASLTVSGLQADDEAVYYCSSYGGSNNFRVFGGGTKLTVLGSRGGGGSGGGGSGGGGSLEMAEVQLVESGGGVVRPGGSLRLSCAASGFTFGDYGMSWVRQAPGKGLEWVSGINWNGGSTGYADSVKGRFTISRDNAKNSLYLQMNSLRAEDTAVYYCARSKQDYWGQGTLVTVSS

SEQ ID NO: 775 - protein, 249 aa, Artificial Sequence
  source: /note="Description of Artificial Sequence: Synthetic scFv sequence"
QSALTQPPSASGSPGQSVTISCTGTSSDIGGYNYVSWYQQHPGKAPKLMIYEVNKRPSGVPDRFSGSKSGNTASLTVSGLQAEDEADYYCASFAGRKTLVFGGGTKLTVLGSRGGGGSGGGGSGGGGSLEMAQVQLVQSGAEVKKPGASVKVSCRASGYTFTAYSLHWVRQAPGQGLEWMGWINPSSGGAVYAQKFQGRVTMTRDTSISTAYMELSGLRSDDTAVYYCARNVGGQADDWGQGTLVTVSS

SEQ ID NO: 776 - protein, 248 aa, Artificial Sequence
  source: /note="Description of Artificial Sequence: Synthetic scFv sequence"
QSALTQPPSASGSPGQSVTISCTGTSSDVGGYNYVSWYQQHPGKAPKLMIYEVSKRPSGVPDRFSGSKSGNTASLTVSGLQAEDEADYYCSSYAGSNTLVFGGGTKLTVLGSRGGGGSGGGGSGGGGSLEMAQMQLVQSGAEVKKPGASVKVSCKASGYTFTSYYMHWVRQAPGQGLEWMGIINPSGGSSSYAQKFQGRVTMTRDTSTSTVYMELSSLRSEDTAVYYCARAGMGMDTWGQGTLVTVSS

SEQ ID NO: 777 - protein, 248 aa, Artificial Sequence
  source: /note="Description of Artificial Sequence: Synthetic scFv sequence"
QSALTQPPSASGSPGQSVTISCTGTSSDVGGYNYVSWYQQHPGKAPKLMIYEVSKRPSGVPDRFSGSKSGNTASLTVSGLQAEDEADYYCSSYAGSNTLVFGGGTKLTVLGSRGGGGSGGGGSGGGGSLEMAQMQLVQSGAEVKKPGASVKVSCKASGYTFTSYYMHWVRQAPGQGLEWMGIINPSGGSTSYAQKFQGRVTMTRDTSTSTVYMELSSLRSEDTAVYYCARAGMGMDTWGQGTLVTVSS

SEQ ID NO: 778 - protein, 249 aa, Artificial Sequence
  source: /note="Description of Artificial Sequence: Synthetic scFv sequence"
QSALTQPPSASGSPGQSVTISCTGTSTDIGGYNYVSWYQHHPSKAPKLMIYEVNKRPSGVPDRFSGSKSGNTASLTVSGLQAEDEADYYCASFAGRKTLVFGGGTKLTVLGSRGGGGSGGGGSGGGGSLEMAQVQLVQSGAEVKKPGASVKVSCRASGYTFTAYSLHWVRQAPGQGLEWMGWINPSSGGAVYAQKFQGRVTMTRDTSISTAYMELSGLRSDDTAVYYCARNVGGHADDWGQGTLVTVSS

SEQ ID NO: 779 - protein, 246 aa, Artificial Sequence
  source: /note="Description of Artificial Sequence: Synthetic scFv sequence"
QSVLTQPASVSGSPGQSLTISCTGTSNDVGAYKYVSWYQQYPGKAPKLILYDVFKRPSGVSNRFSGSKSDNTASLTISGLQAEDEADYYCFSLTSSNTYVFGTGTKVTVLGSRGGGGSGGGGSGGGGSLEMAQMQLVQSGAEVKKPGASVKVSCKASGYTFNRYAITWVRQAPGQGLEWMGWISAYNGNSHYAQKLQGRVTMTTDTSTGTAYMELRRLRSDDTAVYYCARMAYDSWGQGTLVTVSS

SEQ ID NO: 780 - protein, 249 aa, Artificial Sequence
  source: /note="Description of Artificial Sequence: Synthetic scFv sequence"
QSVLTQPPSASGTPGQRVTISCSGSRSNVGGNYVFWYQQVPGATPKLLIYRSNQRPSGVPDRFAGSKSGSSASLAISGLRSEDEADYYCATWDDSLSGFVFGTGTKVTVLGSRGGGGSGGGGSGGGGSLEMAEVQLVESGGGLVKPGGSLRLSCAASGFTFSDYYMSWIRQAPGKGLEWVSYISSSGSTIYYADSVKGRFTISRDNAKNSLYLQMNSLRAEDTAVYYCARGYGKAYDQWGQGTLVTVSS

SEQ ID NO: 781 - protein, 252 aa, Artificial Sequence
  source: /note="Description of Artificial Sequence: Synthetic scFv sequence"
QSVLTQPPSASGTPGQRVTISCSGSSSNIGSNYVYWYQQLPGTAPKLLIYRNNQRPSGVPDRFSGSKSGTSASLAISGLRSEDEADYYCAAWDDSLSGWVFGGGTKLTVLGSRGGGGSGGGGSGGGGSLEMAQVQLVQSGAEVKKPGSSVKVSCKASGGTFSSYAISWVRQAPGQGLEWMGWMNPNSGNTGYAQKFQGRVTMTRNTSISTAYMELSSLRSEDTAVYYCARYQSYKGSQSDSWGQGTLVTVSS

SEQ ID NO: 782 - protein, 249 aa, Artificial Sequence
  source: /note="Description of Artificial Sequence: Synthetic scFv sequence"
  MOD_RES (37)..(37): Any amino acid
QSVLTQPPSLSGAPGQRVTISCSGSRSNIGTNYVSWXQQLPGTAPKLLIYRNHQWPSGVPDRFTGSKSGTSASLAISGLRSEDEADYYCAAWDDNLSGVVFGGGTKLTVLGSRGGGGSGGGGSGGGGSLEMAEVQLVETGGGLVQPGGSLRLSCAASGSTFSSYAMSWVRQAPGKGLEWVSAISGRGRSTYYADSVKGRFTISRDNSKNTLYLQMNSLRAEDTAVYYCARYYKSSKDHWGQGTLVTVSS

SEQ ID NO: 783 - protein, 252 aa, Artificial Sequence
  source: /note="Description of Artificial Sequence: Synthetic scFv sequence"
QSVLTQPPSVSAAPGQKVTIPCSGSRSNVGNYYVSWYQQLPGTAPKLLIYDNNKRPSGIPDRFSGSKSGTSATLGITGLQTGDEADYFCGTWDGSLSAHVFGTGTKVTVLGSRGGGGSGGGGSGGGGSLEMAQVQLVQSGSELKKPGASVRVSCTASGYTFTSYYMHWVRQAPGQGLEWMGVINPNAGSTRYAQKFQGRVTMSTDTSTSTAYMDLSSLRSEDTAVYYCARGMYRSLLFYDPWGQGTLVTVSS

SEQ ID NO: 784 - protein, 250 aa, Artificial Sequence
  source: /note="Description of Artificial Sequence: Synthetic scFv sequence"
QSVVTQPASVSGSPGQSITISCTGTSSDVGGYNYVSWYQQHPGKAPKLMIYDVSKRPSGVSNRFSGSKSGNTASLTISGLQAEDEADYYCSSYTSSSTLVFGGGTKLTVLGSRGGGGSGGGGSGGGGSLEMAEVQLVESGGAFVQPGGSLRLSCAASGFTFSSYAMTWVRQAPGKGLEWVSTISGRGRSTFYADSVKGRFTISRDNSKNTLYLQMNSLRAEDTAVYYCARYYHAGAFDLWGQGTLVTVSS

SEQ ID NO: 785 - protein, 248 aa, Artificial Sequence
  source: /note="Description of Artificial Sequence: Synthetic scFv sequence"
QSVVTQPPSMSAAPGQQVTISCSGGNSNIERNYVSWYLQLPGTAPKLVIFDNDRRPSGIPDRFSGSKSGTSATLGITGLQTGDEADYYCGTWDSSLRGWVFGGGTKLTVLGSRGGGGSGGGGSGGGGSLEMAEVQLVESGGGLIQPGGSLRLSCAASGFTFSNYAMNWVRQAPGKGLEWVSTINGRGSSTIYADSVKGRFTISRDNSKNTLYLQMNSLRAEDTATYYCARYISRGLGDSWGQGTLVTV

SEQ ID NO: 786 - protein, 261 aa, Artificial Sequence
  source: /note="Description of Artificial Sequence: Synthetic scFv sequence"
QSVVTQPPSVSAAPGQKVTISCSGSSSNIGNNYVSWYQQLPGTAPKLLIYDNNKRPSGIPDRFSGSKSGTSATLGITGLQTGDEADYYCGTWDSSLSGVVFGGGTKLTVLGSRGGGGSGGGGSGGGGSLEMAQVQLVQSGGEVKKPGASVKVSCKASGFTFNTYGISWVRQAPGQGLEWMGWISANNGHTKSAQRFQDRVAMATDTSTSTAYMELRSLKFDDTAVYYCARGGYHHQMQRYYKATSVYSDYWGQGTLVTVSS

SEQ ID NO: 787 - protein, 248 aa, Artificial Sequence
  source: /note="Description of Artificial Sequence: Synthetic scFv sequence"
QSVVTQPPSVSGAPGQRVTISCTGSSSNIGAGYDVHWYQQLPGTAPKLLIYGNSNRPSGVPDRFSGSKSGTSASLAITGLQAEDEADYYCQSYDSSLSGSYVFGTGTKLTVLGSRGGGGSGGGGSGGGGSLEMAEVQLVETGGNLVQPGASLRLSCAASGFSFSGTAMHWVRQAPGKGLEWVSTISSTGRSTYYRDSVKGRFTISRDNSKNTLYLQMNSLRGEDTAVYYCARVSFDYWGQGTLVTVSS

SEQ ID NO: 788 - protein, 250 aa, Artificial Sequence
  source: /note="Description of Artificial Sequence: Synthetic scFv sequence"
SSELTQDPAVSVALGQTVRITCQGDSLRSYYASWYQQKPGQAPVLVIYGKNNRPSGIPDRFSGSSSGNTASLTITGAQAEDEADYYCNSRDSSGNPPVVFGGGTKLTVLGSRGGGGSGGGGSGGGGSLEMAQVQLVESGGGLVHPGGSLRLSCAASGFTFRSHSMNWVRQAPGKGLEWVSSISSDSTYTYYADSVKGRFTISRDNAKNSLYLQMNSLRAEDTAVYYCARSGGQWKYYDYWGQGTLVTVSS

SEQ ID NO: 789 - protein, 251 aa, Artificial Sequence
  source: /note="Description of Artificial Sequence: Synthetic scFv sequence"
SYELTQPPSASGTPGQRVTISCSGSSSNIGSNYVSWYQQLPGTAPKLLIYRNNQRPSGVPDRFSGSKSGTSASLAISGLRSEDEADYYCAAWDDSLSGVVFGGGTKLTVLGSRGGGGSGGGGSGGGGSLEMAEVQLVQSGAEVKKPGSSVKVSCKASGGTFSSYAISWVRQAPGQGLEWMGGIIPIFGTAKYAQKFQGRVTITADESTSTAYMELSSLRSEDTAVYYCARSHVAWSLLDYWGQGTLVTVSS

SEQ ID NO: 790 - protein, 244 aa, Artificial Sequence
  source: /note="Description of Artificial Sequence: Synthetic scFv sequence"
SYVLTQPPSASGTPGQRVTISCSGSSSNIGSNTVNWYQQLPGTAPKLLIYRNNQRPSGVPDRFSGSKSGTSASLAISGLRSEDEADYYCAAWDDSLSGLFGTGTKVTVLGSRGGGGSGGGGSGGGGSLEMAQMQLVQSGAEVKKPGASVKVSCKASEYTFTRHILHWVRQAPGQSLEWMGWINPGNGNTKYSQKFQVRVTFTRDTSASTVYMELSSLRSEDTAVYYCARLPDQWGQGTLVTVSS

SEQ ID NO: 791 - protein, 263 aa, Artificial Sequence
  source: /note="Description of Artificial Sequence: Synthetic scFv sequence"
MAVLGLLFCLVTFPSCVLSQVQVKESGPFLVPPSQSLSITCTVSGFSLTTYGVSWIRQPPGKGLEWLGAIWGDGTTNYHSALISRLSISKDNSKSQVFLKLNSLQTDDTATYYCAKLGNYDALDYWGQGTSVTVSSGGGGSGGGGSGGGGSDVLMTQTPLSLPVSLGDQASISCRSSQSIVHSNGNTYLEWYLQKPGQSPNLLIYFVSNRFSGVPDRFSGSGSGTDFTLKISRVEAEDLGVYYCFQGSHVPWTFGGGTKLEIK

SEQ ID NO: 792 - protein, 291 aa, Artificial Sequence
  source: /note="Description of Artificial Sequence: Synthetic scFv sequence"
MKYLLPTAAAGLLLLAAQPAMAQVQLVESGGGLVQPGGSLRLSCAASGFTFRSYAMSWVRQAPGKGLEWVSAISGRGDNTYYADSVKGRFTISRDNSKNTLYLQMNSLRAEDTAVYYCAKMTSNAFAFDYWGQGTLVTVSSGGGGSGGGGSGGGGSQSVLTQPPSVSGAPGQRVTISCTGSSSNIGAGYGVHWYQQLPGTAPKLLIYGNTNRPSGVPDRFSGFKSGTSASLAITGLQAEDEADYYCQSYDSSLSGWVFGGGTKLTVLGAAAEQKLISEEDLNGAAHHHHHH

SEQ ID NO: 793 - protein, 291 aa, Artificial Sequence
  source: /note="Description of Artificial Sequence: Synthetic scFv sequence"
MKYLLPTAAAGLLLLAAQPAMAQVQLVQSGGGLVQPGRSLRLSCAASGFTFDDYAMHWVRQAPGKGLEWVSGISWNSGSIGYADSVKGRFTISRDNAKNSLYLQMNSLRPEDTAVYYCARDLGAKQWLEGFDYWGQGTLVTVSSGGGGSGGGGSGGGGSNFMLTQDPAVSVALGQTVRITCQGDSLRSYYASWYQQKPGQAPVLVIYGKNNRPSGIPDRFSGSTSGNSASLTITGAQAEDEADYYCNSRDSSGNHWVFGGGTKVTVLGAAAEQKLISEEDLNGAAHHHHHH

SEQ ID NO: 794 - protein, 278 aa, Artificial Sequence
  source: /note="Description of Artificial Sequence: Synthetic scFv sequence"
MRFSTTLATAATALFFTASQVSAEVQLVESGGGLVQPGGSLRLSCAASGFNIKDTYIHWVRQAPGKGLEWVARIYPTNGYTRYADSVKGRFTISADTSKNTAYLQMNSLRAEDTAVYYCSRWGGDGFYAMDYWGQGTLVTVSSGGGGSGGGGSGGGGSGGGGSDIQMTQSPSSLSASVGDRVTITCRASQDVNTAVAWYQQKPGKAPKLLIYSASFLYSGVPSRFSGSRSGTDFTLTISSLQPEDFATYYCQQHYTTPPTFGQGTKVEIKSGHHHHHH

SEQ ID NO: 795 - protein, 280 aa, Artificial Sequence
  source: /note="Description of Artificial Sequence: Synthetic scFv sequence"
MRFSTTLATAATALFFTASQVSAGHHHHHHSGEVQLVESGGGLVQPGGSLRLSCAASGFNIKDTYIHWVRQAPGKGLEWVARIYPTNGYTRYADSVKGRFTISADTSKNTAYLQMNSLRAEDTAVYYCSRWGGDGFYAMDYWGQGTLVTVSSGGGGSGGGGSGGGGSGGGGSDIQMTQSPSSLSASVGDRVTITCRASQDVNTAVAWYQQKPGKAPKLLIYSASFLYSGVPSRFSGSRSGTDFTLTISSLQPEDFATYYCQQHYTTPPTFGQGTKVEIKS

SEQ ID NO: 796 - protein, 665 aa, Artificial Sequence
  source: /note="Description of Artificial Sequence: Synthetic scFv sequence"
MTVLAPAWSPTTYLLLLLLLSSGLSGTQDCSFQHSPISSDFAVKIRELSDYLLQDYPVTVASNLQDEELCGGLWRLVLAQRWMERLKTVAGSKMQGLLERVNTEIHFVTKCAFQPPPSCLRFVQTNISRLLQETSEQLVALKPWITRQNFSRCLELQCQPDSSTLPPPWSPRPLEATAPTAPEPKSCDKTHTCPPCPAPELLGGPSVFLFPPKPKDTLMISRTPEVTCVVVDVSHEDPEVKFNWYVDGVEVHNAKTKPREEQYNSTYRVVSVLTVLHQDWLNGKEYKCKVSNKALPAPIEKTISKAKGQPREPQVYTLPPSRDELTKNQVSLTCLVKGFYPSDIAVEWESNGQPENNYKTTPPVLDSDGSFFLYSKLTVDKSRWQQGNVFSCSVMHEALHNHYTQKSLSLSPGKEVQLVESGGGLVQPGGSLRLSCAASGFNIKDTYIHWVRQAPGKGLEWVARIYPTNGYTRYADSVKGRFTISADTSKNTAYLQMNSLRAEDTAVYYCSRWGGDGFYAMDYWGQGTLVTVSSASTKGPSVGGGGSGGGGSGGGGSDIQMTQSPSSLSASVGDRVTITCRASQDVNTAVAWYQQKPGKAPKLLIYSASFLYSGVPSRFSGSRSGTDFTLTISSLQPEDFATYYCQQHYTTPPTFGQGTKVEIKR

SEQ ID NO: 797 - protein, 643 aa, Artificial Sequence
  source: /note="Description of Artificial Sequence: Synthetic scFv sequence"
EVQLLEQSGAELVRPGALVKLSCKASGFKIKDYFVNWVKQRPEQGLEWIGWIDPENDNSLYGPNFQDKASITADTSSNTGYLQLSGLTSEDTAVYYCALYYGSRGDAMDYWGQGTTVTVSSGGGGSGGGGSGGGGSELVMTQTPSSLSASLGDRVTISCRASQDISNYLNWYQQKPDGTVKLLIYYTSRLHSGVPSRFSGSGSGTDYSLTISNLEQEDIATYFCQQGNTLPLTFGAGTKLEIKSGGGGSEVQLVESGGGLVQPGGSLKLSCAASGFTFNSYAMNWVRQAPGKGLEWVARIRSKYNNYATYYADSVKGRFTISRDDSKNTAYLQMNNLKTEDTAVYYCVRHGNFGNSYVSWWAYWGQGTLVTVSSGGGGSGGGGSGGGGSQTVVTQEPSLTVSPGGTVTLTCGSSTGAVTSGNYPNWVQQKPGQAPRGLIGGTKFLAPGTPARFSGSLLGGKAALTLSGVQPEDEAEYYCVLWYSNRWVFGGGTKLTVLAAADYKDDDDKGSSHHHHHHEVQLVESGGGLVQPGGSLKLSCAASGFTFNKYAMNWVRQAPGKGLEWVARIRSKYNNYATYYADSVKDRFTISRDDSKNTAYLQMNNLKTEDTAVYYCVRHGNFGNSYISYWAYWGQGTLVTVSS

SEQ ID NO: 798 - protein, 260 aa, Artificial Sequence
  source: /note="Description of Artificial Sequence: Synthetic scFv sequence"
DVQITQSPSYLAASPGETITINCRASKSISKYLAWYQEKPGKTNKLLIYSGSTLQSGIPSRFSGSGSGTDFTLTISSLEPEDFAMYYCQQHNEYPYTFGGGTKLEIKRGSTSGSGKPGSGEGSTKGEVMLVESGGGLVKPGGSLKLSCAASGFTFSSYAMSWVRQTPEKRLEWVATITSGGDYTFYPDSVKGRFTISRDNAKNTLYLQMSSRRSEDTAMYYCARHGEIGYGSSAWFAYWGQGTLVTVSAGGGGSGGGGSC

SEQ ID NO: 799 - protein, 232 aa, Artificial Sequence
  source: /note="Description of Artificial Sequence: Synthetic scFv sequence"
QVQLVQSGAEVKEPGSSVKVSCKASGGTFSSYAIYWVRQAPGQGLEWMGWINPDSGDTNSAQQFQGRVTMTRDTSISTAYMELSRLRSDDTAMYYCARPPRGDGPDYWGQGTLVTVSSGGGGGSEIVLTQSPGTLSLSPGERATLSCRASQSVSSSYLAWYQQKPGQAPRLLIYGASSRATGIPDRFSGSGSGTDFTLTISRLEPEDFAVYYCQQYGSSPRTFGQGTKVDIK

SEQ ID NO: 800 - protein, 244 aa, Artificial Sequence
  source: /note="Description of Artificial Sequence: Synthetic scFv sequence"
QVQLVQSGAEVKKPGASVKVSCKASGYTFSNYGITWVRQAPGQGLEWMGWINNGNTHYAQKFQGRVTMTTDTSTSTAYMELRSLRSDDTAVYYCARDPRGDDEPYWGQGTLVTVSSGGGGSGGGGSGGGGSEIVLTQSPLSLPVTLGQPASISCRSSQNLVYSDGNTYLSWFQQRPGQSPRRLIYKVSNRDSGVPDRFSGSGSGTDFTLKISRVEAEDIGVYYCMQGTHWPPRTFGQGTKVEIK

SEQ ID NO: 801 - protein, 255 aa, Artificial Sequence
  source: /note="Description of Artificial Sequence: Synthetic scFv sequence"
EIVLTQSPGTLSLSPGERATLSCRASQSVGSSYLAWYQQKPGQAPRLLIYGAFSRATGIPDRFSGSGSGTDFTLTISRLEPEDFAVYYCQQYGSSPWTFGQGTKVEIKGSTSGSGKPGSGEGSTKGQVQLVESGGGVVQPGRSLRLSCAASGFTFSSYTMHWVRQAPGKGLEWVTFISYDGNNKYYADSVKGRFTISRDNSKNTLYLQMNSLRAEDTAIYYCARTGWLGPFDYWGQGTLVTVSSGGGGSGGGGSC

SEQ ID NO: 802 - protein, 511 aa, Artificial Sequence
  source: /note="Description of Artificial Sequence: Synthetic scFv sequence"
METDTLLLWVLLLWVPAGNGEVQLVESGGGLVQPGGSLRLSCSFSGFSLSTSGMGVSWVRQAPGKGLEWLAHIYWDDDKRYNPSLKSRFTISRDNSKNTVYLQMNSLRAEDTAVYYCARRETVFYWYFDVWGQGTTVTVSSGGGGSGGGGSGGGTGDIVMTQSPDSLAVSLGDRATINCKASQSVDYDGDSYMNWYQQKPGQPPKLLIYAASNLESGVPDRFSGSGSGTDFTLTISSLQAEDVAVYYCQQSNEDPPTFGGGTKVEISSSSGSDKTHTCPPCPAPELLGGPSVFLFPPKPKDTLMISRTPEVTCWVDVSHEDPEVKFNWYVDGVEVHNAKTKPREEQYNSTYRWSVLTVLHQDWLNGKEYKCKVSNKALPAPIEKTISKAKGQPREPQVYTLPPSREEMTKNQVSLTCLVKGFYPSDIAVEWESNGQPENNYKTTPPVLDSDGSFFLYSKLTVDKSRWQQGNVFSCSVMHEALHNHYTQKSLSLSPGSSSSSSAWSHPQFEK

SEQ ID NO: 803 - protein, 506 aa, Artificial Sequence
  source: /note="Description of Artificial Sequence: Synthetic scFv sequence"
METDTLLLWVLLLWVPAGNGEVQLVESGGGLVKPGGSLRLSCAASGFTFNTNAMNWVRQAPGKGLEWVARIRSKSNNYATYYADSVKDRFTLSRDDSKNTLYLQMNSLKTEDTAVYYCTRDRGWGAMDYWGQGTTVTVSSGGGGSGGGGSGGGTGDIQMTQSPSSLSASVGDRVTITCSASQDINNYLNWYQQKPGKAPKLLIYYTSSLHSGVPSRFSGSGSGTDFTLTLSSLQPEDFATYYCQQFSNLPWTFGGGTKLEISSSSGSDKTHTCPPCPAPELLGGPSVFLFPPKPKDTLMISRTPEVTCWVDVSHEDPEVKFNWYVDGVEVHNAKTKPREEQYNSTYRWSVLTVLHQDWLNGKEYKCKVSNKALPAPIEKTISKAKGQPREPQVYTLPPSREEMTKNQVSLTCLVKGFYPSDIAVEWESNGQPENNYKTTPPVLDSDGSFFLYSKLTVDKSRWQQGNVFSCSVMHEALHNHYTQKSLSLSPGSSSSSSAWSHPQFEK

SEQ ID NO: 804 - protein, 244 aa, Artificial Sequence
  source: /note="Description of Artificial Sequence: Synthetic scFv sequence"
QVQLQQSGAEVKKPGASVKVSCKASGYTFTGYYMHWVRQAPGQGLEWMGRINPNSGGTNYAQKFQGRVTMTRDTSISTAYMELSRLRSEDTAVYYCARGRYYGMDVWGQGTMVTVSSGGGGSGGGGSGGGGSGGGGSEIVLTQSPATLSLSPGERATISCRASQSVSSNFAWYQQRPGQAPRLLIYDASNRATGIPPRFSGSGSGTDFTLTISSLEPEDFAAYYCHQRSNWLYTFGQGTKVDIK

SEQ ID NO: 805 - protein, 252 aa, Artificial Sequence
  source: /note="Description of Artificial Sequence: Synthetic scFv sequence"
QVQLVQSGAEVKKPGASVKVSCKASGYTFTSYYMHWVRQAPGQGLEWMGIINPSGGSTSYAQKFQGRVTMTRDTSTSTVYMELSSLRSEDTAVYYCARYRLIAVAGDYYYYGMDVWGQGTMVTVSSGGGGSGGGGSGGGGSGGGGSDIQMTQSPSSVASVGDRVTITCRASQGVGRWLAWYQQKPGTAPKLLIYAASTLQSGVPSRFSGSGSGTDFTLTINNLQPEDFATYYCQQANSFPLTFGGGTRLEIK

SEQ ID NO: 806 - protein, 508 aa, Artificial Sequence
  source: /note="Description of Artificial Sequence: Synthetic scFv sequence"
VLTQTPSPVSAAVGGTVTINCQSSPSLIYDSRLAWYQQKPGQPPKLLIYKASTLASGVPSRFSGSGSGTQFTLTISDVQSDDAATYYCQSHDTNPGSSTYGAPFGGGTEVVVQGGGGSGGGGSSGGGSEVQLMESGGGLVKPEGSLTLTCKVSGFSFSTSAISWVRQAPGKRPEWIAGIYNGGGSTYYASWVNGRFSISRSTSLNTVTLQMTRLTAADTATYFCARWIRIHYSFDLWGPGTLVTVSSSGGGGSEVQLVESGGGLVQPGGSLKLSCAASGFTFNKYAMNWVRQAPGKGLEWVARIRSKYNNYATYYADSVKDRFTISRDDSKNTAYLQMNNLKTEDTAVYYCVRHGNFGNSYISYWAYWGQGTLVTVSSGGGGSGGGGSGGGGSQTVVTQEPSLTVSPGGTVTLTCGSSTGAVTSGNYPNWVQQKPGQAPRGLIGGTKFLAPGTPARFSGSLLGGKAALTLSGVQPEDEAEYYCVLWYSNRWVFGGGTKLTVLHHHHHH

SEQ ID NO: 807 - protein, 245 aa, Artificial Sequence
  source: /note="Description of Artificial Sequence: Synthetic scFv sequence"
EVQLVESGGGLVQPGRSLRLSCAASGFTFDDYAMHWVRQAPGKGLEWVSISWNSGSTGYADSVKGRFTISRDNAKNSLYLQMNSLRAEDTALYYCAKDSSSWYGGGSAFDIWGQGTMVTVSSGGGGSGGGGSGGGGSSSELTQDPAVSVALGQTVRITCQGDSLRSYYASWYQQKPGQAPVLVIYGKNNRPSGIPDRFSGSSSGNTASLTITGAQAEDEADYYCNSRGSSGNHYVFGTGTKVTVL

SEQ ID NO: 808 - protein, 245 aa, Artificial Sequence
  source: /note="Description of Artificial Sequence: Synthetic scFv sequence"
EVQLVESGGGLVQPGRSLRLSCAASGFTFDDYAMHWVRQAPGKGLEWVSISWNSGSTGYADSVKGRFTISRDNAKNSLYLQMNSLRAEDTALYYCAKDSSSWYGGGSAFDIWGQGTMVTVSSGGGGSGGGGSGGGGSSSELTQEPAVSVALGQTVRITCQGDSLRSYYASWYQQKPGQAPVLVIFGRSRRPSGIPDRFSGSSSGNTASLIITGAQAEDEADYYCNSRDNTANHYVFGTGTKLTVL

SEQ ID NO: 809 - protein, 268 aa, Artificial Sequence
  source: /note="Description of Artificial Sequence: Synthetic scFv sequence"
MVLLVTSLLLCELPHPAFLLIPDIQAQVQLVQSGAEVKRPGASVQVSCRASGYSINTYYMQWVRQAPGAGLEWMGVINPSGVTSYAQKFQGRVTLTNDTSTNTVYMQLNSLTSADTAVYYCARWALWGDFGMDVWGKGTLVTVSSGGGGSGGGGSGGGGSDIQMTQSPSTLSASIGDRVTITCRASEGIYHWLAWYQQKPGKAPKLLIYKASSLASGAPSRFSGSGSGTDFTLTISSLQPDDFATYYCQQYSNYPLTFGGGTKLEIKR

SEQ ID NO: 810 - protein, 267 aa, Artificial Sequence
  source: /note="Description of Artificial Sequence: Synthetic scFv sequence"
MVLLVTSLLLCELPHPAFLLIPDIQQVQLQQSGPELEKPGASVKISCKASGYSFTGYTMNWVKQSHGKSLEWIGLITPYNGASSYNQKFRGKATLTVDKSSSTAYMDLLSLTSEDSAVYFCARGGYDGRGFDYWGQGTTVTVSSGGGGSGGGGSGGGGSDIELTQSPAIMSASPGEKVTMTCSASSSVSYMHWYQQKSGTSPKRWIYDTSKLASGVPGRFSGSGSGNSYSLTISSVEAEDDATYYCQQWSGYPLTFGAGTKLEIKAA

SEQ ID NO: 811 - protein, 265 aa, Artificial Sequence
  source: /note="Description of Artificial Sequence: Synthetic scFv sequence"
MVLLVTSLLLCELPHPAFLLIPDIQQVQLQQSGPELEKPGASVKISCKASGYSFTGYTMNWVKQSHGKSLEWIGLITPYNGASSYNQKFRGKATLTVDKSSSTAYMDLLSLTSEDSAVYFCARGGYDGRGFDYWGQGTTVTVSSGGGGSGGGGSSGGGSDIELTQSPAIMSASPGEKVTMTCSASSSVSYMHWYQQKSGTSPKRWIYDTSKLASGVPGRFSGSGSGNSYSLTISSVEAEDDATYYCQQWSKHPLTFGAGTKLEIK

SEQ ID NO: 812 - protein, 262 aa, Artificial Sequence
  source: /note="Description of Artificial Sequence: Synthetic scFv sequence"
QVQLQESGPGLVKPSETLSLTCTVSGGSVSSGSYYWSWIRQPPGKGLEWIGYIYYSGSTNYNPSHKSRVTISVDTSKNQFSLKLSSVTAADTAVYYCAREGKNGAFDIWGQGTMVTVSSSGGGGSGGGGSGGGGERHQMTQSPSSLSASVGDRVTITCRASQSISSYLNWYQQKPGKAPKLLIYAASSLQSGVPSRFSGSGSGTDFTLTISSLQPEDFATYYCQQSYSTPLTFGGGTKVEIKGQAGHHHHHHGDYKDDDDKG

SEQ ID NO: 813 - protein, 243 aa, Artificial Sequence
  source: /note="Description of Artificial Sequence: Synthetic scFv sequence"
QVQLQQSGAEVKKPGASVKVSCKASGYTFTGYYMHWVRQAPGQGLEWMGINPNSGGTNYAQKFQGRVTMTRDTSISTAYMELSRLRSEDTAVYYCARGRYYGMDVWGQGTMVTVSSGGGGSGGGGSGGGGSGGGGSEIVLTQSPATLSLSPGERATISCRASQSVSSNFAWYQQRPGQAPRLLIYDASNRATGIPPRFSGSGSGTDFTLTISSLEPEDFAAYYCHQRSNWLYTFGQGTKVDIK

SEQ ID NO: 814 - protein, 240 aa, Artificial Sequence
  source: /note="Description of Artificial Sequence: Synthetic scFv sequence"
QVQLQQSGAEVKKPGASVKVSCKASGYTFTGYYMHWVRQAPGQGLEWMGINPNSGGTNYAQNFQGRVTMTRDTSISTAYMELRRLRSDDTAVYYCASGWDFDYWGQGTLVTVSSGGGGSGGGGSGGGGSGGGGSDIRMTQSPSSLSASVGDRVTITCRASQSIRYYLSWYQQKPGKAPKLLIYTASILQNGVPSRFSGSGSGTDFTLTISSLQPEDFATYYCLQTYTTPDFGPGTKVEIK

SEQ ID NO: 815 - protein, 249 aa, Artificial Sequence
  source: /note="Description of Artificial Sequence: Synthetic scFv sequence"
QVQLQQSGAEVKKPGASVKVSCKASGYTFTNYYMHWVRQAPGQGLEWMGLINPSGGYTTYAQKFQGRLTMTRDTSTSTVYMELSSLRSEDTAVYYCARIRSCGGDCYYFDNWGQGTLVTVSSGGGGSGGGGSGGGGSGGGGSDIQLTQSPSTLSASVGDRVTITCRASENVNIWLAWYQQKPGKAPKLLIYKSSSLASGVPSRFSGSGSGAEFTLTISSLQPDDFATYYCQQYQSYPLTFGGGTKVDIK

SEQ ID NO: 816 - protein, 245 aa, Artificial Sequence
  source: /note="Description of Artificial Sequence: Synthetic scFv sequence"
QVQLQQSGAEVKKPGASVKVSCKTSGYPFTGYSLHWVRQAPGQGLEWMGINPNSGGTNYAQKFQGRVTMTRDTSISTAYMELSRLRSDDTAVYYCARDHYGGNSLFYWGQGTLVTVSSGGGGSGGGGSGGGGSGGGGSDIQLTQSPSSISASVGDTVSITCRASQDSGTWLAWYQQKPGKAPNLLMYDASTLEDGVPSRFSGSASGTEFTLTVNRLQPEDSATYYCQQYNSYPLTFGGGTKVDIK

SEQ ID NO: 817 - protein, 239 aa, Artificial Sequence
  source: /note="Description of Artificial Sequence: Synthetic scFv sequence"
QVQLQQSGPELEKPGASVKISCKASGYSFTGYTMNWVKQSHGKSLEWIGLITPYNGASSYNQKFRGKATLTVDKSSSTAYMDLLSLTSEDSAVYFCARGGYDGRGFDYWGQGTTVTVSSGGGGSGGGGSGGGGSDIELTQSPAIMSASPGEKVTMTCSASSSVSYMHWYQQKSGTSPKRWIYDTSKLASGVPGRFSGSGSGNSYSLTISSVEAEDDATYYCQQWSGYPLTFGAGTKLEI

SEQ ID NO: 818 - protein, 259 aa, Artificial Sequence
  source: /note="Description of Artificial Sequence: Synthetic scFv sequence"
QVQLQQSGPGLVTPSQTLSLTCAISGDSVSSNSATWNWIRQSPSRGLEWLGRTYYRSKWYNDYAVSVKSRMSINPDTSKNQFSLQLNSVTPEDTAVYYCARGMMTYYYGMDVWGQGTTVTVSSGILGSGGGGSGGGGSGGGGSQPVLTQSSSLSASPGASASLTCTLRSGINVGPYRIYWYQQKPGSPPQYLLNYKSDSDKQQGSGVPSRFSGSKDASANAGVLLISGLRSEDEADYYCMIWHSSAAVFGGGTQLTVLS

SEQ ID NO: 819 - protein, 241 aa, Artificial Sequence
  source: /note="Description of Artificial Sequence: Synthetic scFv sequence"
QVQLVESGGGLVQPGGSLRLSCAASGFTFSSYWMHWVRQVPGKGLVWVSINTDGSTTTYADSVEGRFTISRDNAKNTLYLQMNSLRDDDTAVYYCVGGHWAVWGQGTTVTVSSGGGGSGGGGSGGGGSGGGGSDIQMTQSPSTLSASVGDRVTITCRASQSISDRLAWYQQKPGKAPKLLIYKASSLESGVPSRFSGSGSGTEFTLTISSLQPDDFAVYYCQQYGHLPMYTFGQGTKVEIK

SEQ ID NO: 820 - protein, 240 aa, Artificial Sequence
  source: /note="Description of Artificial Sequence: Synthetic scFv sequence"
QVQLVQSGAEVEKPGASVKVSCKASGYTFTDYYMHWVRQAPGQGLEWMGINPNSGGTNYAQKFQGRVTMTRDTSISTAYMELSRLRSDDTAVYYCASGWDFDYWGQGTLVTVSSGGGGSGGGGSGGGGSGGGGSDIVMTQSPSSLSASVGDRVTITCRASQSIRYYLSWYQQKPGKAPKLLIYTASILQNGVPSRFSGSGSGTDFTLTISSLQPEDFATYYCLQTYTTPDFGPGTKVEIK

SEQ ID NO: 821 - protein, 245 aa, Artificial Sequence
  source: /note="Description of Artificial Sequence: Synthetic scFv sequence"
QVQLVQSGAEVKKPGAPVKVSCKASGYTFTGYYMHWVRQAPGQGLEWMGINPNSGGTNYAQKFQGRVTMTRDTSISTAYMELSRLRSDDTAVYYCARGEWDGSYYYDYWGQGTLVTVSSGGGGSGGGGSGGGGSGGGGSDIVLTQTPSSLSASVGDRVTITCRASQSINTYLNWYQHKPGKAPKLLIYAASSLQSGVPSRFSGSGSGTDFTLTISSLQPEDFATYYCQQSFSPLTFGGGTKLEIK

SEQ ID NO: 822 - protein, 248 aa, Artificial Sequence
  source: /note="Description of Artificial Sequence: Synthetic scFv sequence"
QVQLVQSGAEVKKPGASVEVSCKASGYTFTSYYMHWVRQAPGQGLEWMGLINPSGGSTGYAQKFQGRVTMTRDTSTSTVHMELSSLRSEDTAVYYCARGGYSSSSDAFDIWGQGTMVTVSSGGGGSGGGGSGGGGSGGGGSDIQMTQSPPSLSASVGDRVTITCRASQDISSALAWYQQKPGTPPKLLIYDASSLESGVPSRFSGSGSGTDFTLTISSLQPEDFATYYCQQFSSYPLTFGGGTRLEIK

SEQ ID NO: 823 - protein, 252 aa, Artificial Sequence
  source: /note="Description of Artificial Sequence: Synthetic scFv sequence"
QVQLVQSGAEVKKPGASVKVSCKASGYTFTGYYMHWVRQAPGQGLEWMGINPNSGGTNYAQKFQGRVTMTRDTSISTAYMELSRLRSDDTAVYYCARDLRRTVVTPRAYYGMDVWGQGTTVTVSSGGGGSGGGGSGGGGSGGGGSDIQLTQSPSTLSASVGDRVTITCQASQDISNSLNWYQQKAGKAPKLLIYDASTLETGVPSRFSGSGSGTDFSFTISSLQPEDIATYYCQQHDNLPLTFGQGTKVEIK

SEQ ID NO: 824 - protein, 245 aa, Artificial Sequence
  source: /note="Description of Artificial Sequence: Synthetic scFv sequence"
QVQLVQSGAEVKKPGASVKVSCKASGYTFTGYYMHWVRQAPGQGLEWMGINPNSGGTNYAQKFQGRVTMTTDTSTSTAYMELRSLRSDDTAVYYCARTTTSYAFDIWGQGTMVTVSSGGGGSGGGGSGGGGSGGGGSDIQLTQSPSTLSASVGDRVTITCRASQSISTWLAWYQQKPGKAPNLLIYKASTLESGVPSRFSGSGSGTEFTLTISSLQPDDFATYYCQQYNTYSPYTFGQGTKLEIK

SEQ ID NO: 825 - protein, 254 aa, Artificial Sequence
  source: /note="Description of Artificial Sequence: Synthetic scFv sequence"
QVQLVQSGAEVKKPGASVKVSCKASGYTFTSYGISWVRQAPGQGLEWMGISAYNGNTNYAQKLQGRVTMTTDTSTSTAYMELRSLRSDDTAVYYCARVAGGIYYYYGMDVWGQGTTITVSSGGGGSGGGGSGGGGSGGGGSDIVMTQTPDSLAVSLGERATISCKSSHSVLYNRNNKNYLAWYQQKPGQPPKLLFYWASTRKSGVPDRFSGSGSGTDFTLTISSLQPEDFATYFCQQTQTFPLTFGQGTRLEIN

SEQ ID NO: 826 - protein, 251 aa, Artificial Sequence
  source: /note="Description of Artificial Sequence: Synthetic scFv sequence"
QVQLVQSGAEVKKPGASVKVSCKASGYTFTSYYMHWVRQAPGQGLEWMGLINPSGGSTSYAQKFQGRVTMTRDTSTSTVYMELSSLRSEDTAVYYCARYRLIAVAGDYYYYGMDVWGQGTMVTVSSGGGGSGGGGSGGGGSGGGGSDIQMTQSPSSVASVGDRVTITCRASQGVGRWLAWYQQKPGTAPKLLIYAASTLQGVPSRFSGSGSGTDFTLTINNLQPEDFATYYCQQANSFPLTFGGGTRLEIK

SEQ ID NO: 827 - protein, 249 aa, Artificial Sequence
  source: /note="Description of Artificial Sequence: Synthetic scFv sequence"
QVQLVQSGAEVRAPGASVKISCKASGFTFRGYYIHWVRQAPGQGLEWMGLINPSGGSRAYAQKFQGRVTMTRDTSTSTVYMELSSLRSDDTAMYYCARTASCGGDCYYLDYWGQGTLVTVSSGGGGSGGGGSGGGGSGGGGSDIQMTQSPPTLSASVGDRVTITCRASENVNIWLAWYQQKPGKAPKLLIYKSSSLASGVPSRFSGSGSGAEFTLTISSLQPDDFATYYCQQYQSYPLTFGGGTKVDIK

SEQ ID NO: 828 - protein, 252 aa, Artificial Sequence
  source: /note="Description of Artificial Sequence: Synthetic scFv sequence"
QVQLVQSGAEVRRPGASVKISCRASGDTSTRHYIHWLRQAPGQGPEWMGINPTTGPATGSPAYAQMLQGRVTMTRDTSTRTVYMELRSLRFEDTAVYYCARSVVGRSAPYYFDYWGQGTLVTVSSGGGGSGGGGSGGGGSGGGGSDIQMTQSPSSLSASVGDRVTITCRASQGISDYSAWYQQKPGKAPKLLIYAASTLQSGVPSRFSGSGSGTDFTLTISYLQSEDFATYYCQQYYSYPLTFGGGTKVDIK

SEQ ID NO: 829 - protein, 249 aa, Artificial Sequence
  source: /note="Description of Artificial Sequence: Synthetic scFv sequence"
QVQLVQSGGGLVKPGGSLRLSCEASGFIFSDYYMGWIRQAPGKGLEWVSIIGRSGSSMYYADSVKGRFTFSRDNAKNSLYLQMNSLRAEDTAVYYCAASPVVAATEDFQHWGQGTLVTVSSGGGGSGGGGSGGGGSGGGGSDIVMTQTPATLSLSPGERATLSCRASQSVTSNYLAWYQQKPGQAPRLLLFGASTRATGIPDRFSGSGSGTDFTLTINRLEPEDFAMYYCQQYGSAPVTFGQGTKLEIK

SEQ ID NO: 830 - protein, 248 aa, Artificial Sequence
  source: /note="Description of Artificial Sequence: Synthetic scFv sequence"
QVQLVQSGGGLVQPGGSLRLSCAASGFTFSSYAMSWVRQAPGKGLEWVSISGSGGSTYYADSVKGRFTISRDNSKNTLYLQMNSLRAEDTAVYYCAKREAAAGHDWYFDLWGRGTLVTVSSGGGGSGGGGSGGGGSGGGGSDIRVTQSPSSLSASVGDRVTITCRASQSISSYLNWYQQKPGKAPKLLIYAASSLQSGVPSRFSGSGSGTDFTLTISSLQPEDFATYYCQQSYSIPLTFGQGTKVEIK

SEQ ID NO: 831 - protein, 250 aa, Artificial Sequence
  source: /note="Description of Artificial Sequence: Synthetic scFv sequence"
QVQLVQSGGGLVQPGGSLRLSCAASGFTFSSYWMHWVRQAPGKGLVWVSINSDGSSTSYADSVKGRFTISRDNAKNTLYLQMNSLRAEDTAVYYCVRTGWVGSYYYYMDVWGKGTTVTVSSGGGGSGGGGSGGGGSGGGGSEIVLTQSPGTLSLSPGERATLSCRASQSVSSNYLAWYQQKPGQPPRLLIYDVSTRATGIPARFSGGGSGTDFTLTISSLEPEDFAVYYCQQRSNWPPWTFGQGTKVEIK

SEQ ID NO: 832 - protein, 243 aa, Artificial Sequence
  source: /note="Description of Artificial Sequence: Synthetic scFv sequence"
QVQLVQSGGGLVQPGRSLRLSCAASGFTFDDYAMHWVRQAPGKGLEWVSISWNSGSIGYADSVKGRFTISRDNAKNSLYLQMNSLRAEDTAVYYCAKDGSSSWSWGYFDYWGQGTLVTVSSGGGGSGGGGSGGGGSSSELTQDPAVSVALGQTVRTTCQGDALRSYYASWYQQKPGQAPMLVIYGKNNRPSGIPDRFSGSDSGDTASLTITGAQAEDEADYYCNSRDSSGYPVFGTGTKVTVL

SEQ ID NO: 833 - protein, 249 aa, Artificial Sequence
  source: /note="Description of Artificial Sequence: Synthetic scFv sequence"
QVQLVQSGGGVVQPGRSLRLSCAASGFTFSSYAMHWVRQAPGKGLEWVAISYDGSNKYYADSVKGRFTISRDNSKNTLYLQMNSLRAEDTAVYYCARWKVSSSSPAFDYWGQGTLVTVSSGGGGSGGGGSGGGGSGGGGSEIVLTQSPATLSLSPGERAILSCRASQSVYTKYLGWYQQKPGQAPRLLIYDASTRATGIPDRFSGSGSGTDFTLTINRLEPEDFAVYYCQHYGGSPLITFGQGTRLEIK

SEQ ID NO: 834 - protein, 249 aa, Artificial Sequence
  source: /note="Description of Artificial Sequence: Synthetic scFv sequence"
QVQLVQSGGGVVQPGRSLRLSCAASGFTFSSYGMHWVRQAPGKGLEWVAISYDGSNKYYADSVKGRFTISRDNSKNTLYLQMNSLRAEDTAVYYCAKGYSRYYYYGMDVWGQGTTVTVSSGGGGSGGGGSGGGGSGGGGSEIVMTQSPATLSLSPGERAILSCRASQSVYTKYLGWYQQKPGQAPRLLIYDASTRATGIPDRFSGSGSGTDFTLTINRLEPEDFAVYYCQHYGGSPLITFGQGTKVDIK

SEQ ID NO: 835 - protein, 247 aa, Artificial Sequence
  source: /note="Description of Artificial Sequence: Synthetic scFv sequence"
QVQLVQSWAEVKKPGASVKVSCKASGYTFTSYYMHWVRQAPGQGLEWMGLINPSGGSTSYAQKFQGRVTMTRDTSTSTVYMELSNLRSEDTAVYYCARSPRVTTGYFDYWGQGTLVTVSSGGGGSGGGGSGGGGSGGGGSDIQLTQSPSTLSASVGDRVTITCRASQSISSWLAWYQQKPGKAPKLLIYKASSLESGVPSRFSGSGSGTEFTLTISSLQPDDFATYYCQQYSSYPLTFGGGTRLEIK

SEQ ID NO: 836 - protein, 246 aa, Artificial Sequence
  source: /note="Description of Artificial Sequence: Synthetic scFv sequence"
QITLKESGPALVKPTQTLTLTCTFSGFSLSTAGVHVGWIRQPPGKALEWLALISWADDKRYRPSLRSRLDITRVTSKDQVVLSMTNMQPEDTATYYCALQGFDGYEANWGPGTLVTVSSGGGGSGGGGSGGGGSGGGGSDIVMTQSPSSLSASAGDRVTITCRASRGISSALAWYQQKPGKPPKLLIYDASSLESGVPSRFSGSGSGTDFTLTIDSLEPEDFATYYCQQSYSTPWTFGQGTKVDIK

SEQ ID NO: 837 - protein, 493 aa, Artificial Sequence
  source: /note="Description of Artificial Sequence: Synthetic scFv sequence"
MALPVTALLLPLALLLHAARPEVQLQQSGGERATPGASVKMSCKTSGYTFTNYWMHWVKQRPGQGLEWIGYINPSSGYTQYNQKFKDKATLTADKSSSTAYIQLSSLTSEDSAVYYCSTYYGDYLFPYWGQGTLVTVSAGGGGSGGGGSGGGGSDVLMTQTPLSLPVSLGDQASISCRSSQDIVYGNGNTYLEWYLQKPGQSPKLLIYKVSNRFSGVPDRFSGSGSGTDFTLKISRVEAEDLGVYYCFQGSHVPYTFGGGTKLEIKRAAAIEVEQKLISEEDLLDNEKSNGTIIHVKGKHLCPSPLFPGPSKPFWVLVVVGGVLACYSLLVTVAFIIFWVRSKRSRLLHSDYMNMTPRRPGPTRKHYQPYAPPRDFAAYRSRVKFSRSADAPAYQQGQNQLYNELNLGRREEYDVLDKRRGRDPEMGGKPRRKNPQEGLYNELQKDKMAEAYSEIGMKGERRRGKGHDGLYQGLSTATKDTYDALHMQALPPR

SEQ ID NO: 838 - protein, 487 aa, Artificial Sequence
  source: /note="Description of Artificial Sequence: Synthetic scFv sequence"
MALPVTALLLPLALLLHAARPEVQLQQSGGERATPGASVKMSCKTSGYTFTNYWMHWVKQRPGQGLEWIGYINPSSGYTQYNQKFKDKATLTADKSSSTAYIQLSSLTSEDSAVYYCSTYYGDYLFPYWGQGTLVTVSAGGGGSGGGGSGGGGSDVLMTQTPLSLPVSLGDQASISCRSSQDIVYGNGNTYLEWYLQKPGQSPKLLIYKVSNRFSGVPDRFSGSGSGTDFTLKISRVEAEDLGVYYCFQGSHVPYTFGGGTKLEIKRAAAIEFMYPPPYLDNERSNGTIIHIKEKHLCHTQSSPKLFWALVVVAGVLFCYGLLVTVALCVIWTNSRRNRLLQSDYMNMTPRRPGLTRKPYQPYAPARDFAAYRPRAKFSRSAETAANLQDPNQLYNELNLGRREEYDVLEKKRARDPEMGGKQQRRRNPQEGVYNALQKDKMAEAYSEIGTKGERRRGKGHDGLYQGLSTATKDTYDALHMQTLAPR

SEQ ID NO: 839 - protein, 252 aa, Artificial Sequence
  source: /note="Description of Artificial Sequence: Synthetic scFv sequence"
EIVLTQSPATLSLSPGERATLSCRASQSVSSYLAWYQQKPGQAPRLLIYDASNRATGIPARFSGSGSGTDFTLTISSLEPEDFAVYYCQQSSNWPRTFGQGTKVEIKRGSTSGSGKPGSGEGSTKGQVQLVESGGGVVQPGRSLRLDCKASGITFSNSGMHWVRQAPGKGLEWVAVIWYDGSKRYYADSVKGRFTISRDNSKNTLFLQMNSLRAEDTAVYYCATNDDYWGQGTLVTVSSSSGGGGSGGGGSC

SEQ ID NO: 840 - protein, 241 aa, Artificial Sequence
  source: /note="Description of Artificial Sequence: Synthetic scFv sequence"
VQLQESGPDLVKPSQSLSLTCTVTGYSITSGYSWHWIRQFPGNKLEWMGYIHYSGDTDYNPSLKSRFSITRDTSKNQFFLQLNSVTTEDTATYYCATPGGFVYWGQGTLVTVSAGGGGSGGGGSGGGGSDVVMTQTPLTLSVTIGQPASISCKSSQSLLDSDGKTYLHWLLQRPGQSPKRLIFLVSKLDSGVPDRFTGSGSGTDFTLKISRVEAEDLGVYYCWQGTHFPQTFGGGTKLEIK

SEQ ID NO: 841 - protein, 112 aa, Artificial Sequence
  source: /note="Description of Artificial Sequence: Synthetic scFv sequence"
DVVMTQTPLTLSVTIGQPASISCKSSQSLLDSDGKTYLHWLLQRPGQSPKRLIFLVSKLDSGVPDRFTGSGSGTDFTLKISRVEAEDLGVYYCWQGTHFPQTFGGGTKLEIK

SEQ ID NO: 842 - protein, 114 aa, Artificial Sequence
  source: /note="Description of Artificial Sequence: Synthetic scFv sequence"
VQLQESGPDLVKPSQSLSLTCTVTGYSITSGYSWHWIRQFPGNKLEWMGYIHYSGDTDYNPSLKSRFSITRDTSKNQFFLQLNSVTTEDTATYYCATPGGFVYWGQGTLVTVSA

SEQ ID NO: 843 - protein, 112 aa, Artificial Sequence
  source: /note="Description of Artificial Sequence: Synthetic scFv sequence"
DVVMTQTPLSLPVSLGDQASISCRSSQSLLKNNGNTFLHWYLQKSGQSPKLLIYKVSNRLSGVPDRFSGSGSGTYFTLKISRVEAEDLGVYFCSQSTHIPYTFGGGTKLEIK

SEQ ID NO: 844 - protein, 47 aa, Artificial Sequence
  source: /note="Description of Artificial Sequence: Synthetic scFv sequence"
EVKLVESGGGLVLPGDSLRLSCATSEFTFTDYYMTWVRQPPRKALEW

SEQ ID NO: 845 - protein, 219 aa, Artificial Sequence
  source: /note="Description of Artificial Sequence: Synthetic scFv sequence"
DIQMTQSPDSLPVTPGEPASISCRSSQSLLHSNGYNYLDWYLQKAGQSPQLLIYLGSNRASGVPDRFSGSGSGTDFTLKISRVEAEDVGVYYCQQYYNHPTTFGQGTKLEIKRTVAAPSVFIFPPSDEQLKSGTASVVCLLNNFYPREAKVQWKVDNALQSGNSQESVTEQDSKDSTYSLSSTLTLSKADYEKHKVYACEVTHQGLSSPVTKSFNRGEC

SEQ ID NO: 846 - protein, 240 aa, Artificial Sequence
  source: /note="Description of Artificial Sequence: Synthetic scFv sequence"
QVQLQQSGAEVKKPGASVKVSCKASGYTFTGYYMHWVRQAPGQGLEWMGRINPNSGGTNYAQKFQGRVTMTRDTSISTAYMELSRLRSEDTAVYYCARGRYYGMDVWGQGTMVTVSSGGGGSGGGGSGGGGSGGGGSEIVLTQSPATLSLSPGERATISCRASQSVSSNFAWYQQRPGQAPRLLIYDASNRATGIPPRFSGSGSGTDFTLTISSLEPEDFAAYYCHQRSNWLYTFGQGTK

SEQ ID NO: 847 - protein, 253 aa, Artificial Sequence
  source: /note="Description of Artificial Sequence: Synthetic scFv sequence"
QVQLVQSGAEVKKPGASVKVSCKASGYTFTSYYMHWVRQAPGQGLEWMGIINPSGGSTSYAQKFQGRVTMTRDTSTSTVYMELSSLRSEDTAVYYCARYRLIAVAGDYYYYGMDVWGQGTMVTVSSGGGGSGGGGSGGGGSGGGGSDIQMTQSPSSVSASVGDRVTITCRASQGVGRWLAWYQQKPGTAPKLLIYAASTLQSGVPSRFSGSGSGTDFTLTINNLQPEDFATYYCQQANSFPLTFGGGTRLEIK

SEQ ID NO: 848 - protein, 255 aa, Artificial Sequence
  source: /note="Description of Artificial Sequence: Synthetic scFv sequence"
QVQLVQSGAEVKKPGASVKVSCKASGYTFTSYGISWVRQAPGQGLEWMGWISAYNGNTNYAQKLQGRVTMTTDTSTSTAYMELRSLRSDDTAVYYCARVAGGIYYYYGMDVWGQGTTITVSSGGGGSGGGGSGGGGSGGGGSDIVMTQTPDSLAVSLGERATISCKSSHSVLYNRNNKNYLAWYQQKPGQPPKLLFYWASTRKSGVPDRFSGSGSGTDFTLTISSLQPEDFATYFCQQTQTFPLTFGQGTRLEIN

SEQ ID NO: 849 - protein, 241 aa, Artificial Sequence
  source: /note="Description of Artificial Sequence: Synthetic scFv sequence"
QVQLQQSGAEVKKPGASVKVSCKASGYTFTGYYMHWVRQAPGQGLEWMGWINPNSGGTNYAQNFQGRVTMTRDTSISTAYMELRRLRSDDTAVYYCASGWDFDYWGQGTLVTVSSGGGGSGGGGSGGGGSGGGGSDIRMTQSPSSLSASVGDRVTITCRASQSIRYYLSWYQQKPGKAPKLLIYTASILQNGVPSRFSGSGSGTDFTLTISSLQPEDFATYYCLQTYTTPDFGPGTKVEIK

SEQ ID NO: 850 - protein, 246 aa, Artificial Sequence
  source: /note="Description of Artificial Sequence: Synthetic scFv sequence"
QVQLVQSGAEVKKPGASVKVSCKASGYTFTGYYMHWVRQAPGQGLEWMGRINPNSGGTNYAQKFQGRVTMTTDTSTSTAYMELRSLRSDDTAVYYCARTTTSYAFDIWGQGTMVTVSSGGGGSGGGGSGGGGSGGGGSDIQLTQSPSTLSASVGDRVTITCRASQSISTWLAWYQQKPGKAPNLLIYKASTLESGVPSRFSGSGSGTEFTLTISSLQPDDFATYYCQQYNTYSPYTFGQGTKLEIK

SEQ ID NO: 851 - protein, 249 aa, Artificial Sequence
  source: /note="Description of Artificial Sequence: Synthetic scFv sequence"
QVQLVQSGGGLVKPGGSLRLSCEASGFIFSDYYMGWIRQAPGKGLEWVSYIGRSGSSMYYADSVKGRFTFSRDNAKNSLYLQMNSLRAEDTAVYYCAASPVVAATEDFQHWGQGTLVTVSSGGGGSGGGGSGGGGSGGGGSDIVMTQTPATLSLSPGERATLSCRASQSVTSNYLAWYQQKPGQAPRLLLFGASTRATGIPDRFSGSGSGTDFTLTINRLEPEDFAMYYCQQYGSAPVTFGQGTKLEIK

SEQ ID NO: 852 - protein, 249 aa, Artificial Sequence
  source: /note="Description of Artificial Sequence: Synthetic scFv sequence"
QVQLVQSGAEVRAPGASVKISCKASGFTFRGYYIHWVRQAPGQGLEWMGIINPSGGSRAYAQKFQGRVTMTRDTSTSTVYMELSSLRSDDTAMYYCARTASCGGDCYYLDYWGQGTLVTVSSGGGGSGGGGSGGGGSGGGGSDIQMTQSPPTLSASVGDRVTITCRASENVNIWLAWYQQKPGKAPKLLIYKSSSLASGVPSRFSGSGSGAEFTLTISSLQPDDFATYYCQQYQSYPLTFGGGTKVDIK

SEQ ID NO: 853 - protein, 244 aa, Artificial Sequence
  source: /note="Description of Artificial Sequence: Synthetic scFv sequence"
QVQLVQSGGGLVQPGRSLRLSCAASGFTFDDYAMHWVRQAPGKGLEWVSGISWNSGSIGYADSVKGRFTISRDNAKNSLYLQMNSLRAEDTAVYYCAKDGSSSWSWGYFDYWGQGTLVTVSSGGGGSGGGGSGGGGSSSELTQDPAVSVALGQTVRTTCQGDALRSYYASWYQQKPGQAPMLVIYGKNNRPSGIPDRFSGSDSGDTASLTITGAQAEDEADYYCNSRDSSGYPVFGTGTKVTVL

SEQ ID NO: 854 - protein, 246 aa, Artificial Sequence
  source: /note="Description of Artificial Sequence: Synthetic scFv sequence"
EVQLVESGGGLVQPGRSLRLSCAASGFTFDDYAMHWVRQAPGKGLEWVSGISWNSGSTGYADSVKGRFTISRDNAKNSLYLQMNSLRAEDTALYYCAKDSSSWYGGGSAFDIWGQGTMVTVSSGGGGSGGGGSGGGGSSSELTQEPAVSVALGQTVRITCQGDSLRSYYASWYQQKPGQAPVLVIFGRSRRPSGIPDRFSGSSSGNTASLIITGAQAEDEADYYCNSRDNTANHYVFGTGTKLTVL

SEQ ID NO: 855 - protein, 246 aa, Artificial Sequence
  source: /note="Description of Artificial Sequence: Synthetic scFv sequence"
EVQLVESGGGLVQPGRSLRLSCAASGFTFDDYAMHWVRQAPGKGLEWVSGISWNSGSTGYADSVKGRFTISRDNAKNSLYLQMNSLRAEDTALYYCAKDSSSWYGGGSAFDIWGQGTMVTVSSGGGGSGGGGSGGGGSSSELTQDPAVSVALGQTVRITCQGDSLRSYYASWYQQKPGQAPVLVIYGKNNRPSGIPDRFSGSSSGNTASLTITGAQAEDEADYYCNSRGSSGNHYVFGTGTKVTVL

SEQ ID NO: 856 - protein, 251 aa, Artificial Sequence
  source: /note="Description of Artificial Sequence: Synthetic scFv sequence"
QVQLVQSGGGLVQPGGSLRLSCAASGFTFSSYWMHWVRQAPGKGLVWVSRINSDGSSTSYADSVKGRFTISRDNAKNTLYLQMNSLRAEDTAVYYCVRTGWVGSYYYYMDVWGKGTTVTVSSGGGGSGGGGSGGGGSGGGGSEIVLTQSPGTLSLSPGERATLSCRASQSVSSNYLAWYQQKPGQPPRLLIYDVSTRATGIPARFSGGGSGTDFTLTISSLEPEDFAVYYCQQRSNWPPWTFGQGTKVEIK

SEQ ID NO: 857 - protein, 250 aa, Artificial Sequence
  source: /note="Description of Artificial Sequence: Synthetic scFv sequence"
QVQLVQSGGGVVQPGRSLRLSCAASGFTFSSYGMHWVRQAPGKGLEWVAVISYDGSNKYYADSVKGRFTISRDNSKNTLYLQMNSLRAEDTAVYYCAKGYSRYYYYGMDVWGQGTTVTVSSGGGGSGGGGSGGGGSGGGGSEIVMTQSPATLSLSPGERAILSCRASQSVYTKYLGWYQQKPGQAPRLLIYDASTRATGIPDRFSGSGSGTDFTLTINRLEPEDFAVYYCQHYGGSPLITFGQGTKVDIK

SEQ ID NO: 858 - protein, 253 aa, Artificial Sequence
  source: /note="Description of Artificial Sequence: Synthetic scFv sequence"
QVQLVQSGAEVKKPGASVKVSCKASGYTFTGYYMHWVRQAPGQGLEWMGWINPNSGGTNYAQKFQGRVTMTRDTSISTAYMELSRLRSDDTAVYYCARDLRRTVVTPRAYYGMDVWGQGTTVTVSSGGGGSGGGGSGGGGSGGGGSDIQLTQSPSTLSASVGDRVTITCQASQDISNSLNWYQQKAGKAPKLLIYDASTLETGVPSRFSGSGSGTDFSFTISSLQPEDIATYYCQQHDNLPLTFGQGTKVEIK

SEQ ID NO: 859 - protein, 249 aa, Artificial Sequence
  source: /note="Description of Artificial Sequence: Synthetic scFv sequence"
QVQLVQSGGGLVQPGGSLRLSCAASGFTFSSYAMSWVRQAPGKGLEWVSAISGSGGSTYYADSVKGRFTISRDNSKNTLYLQMNSLRAEDTAVYYCAKREAAAGHDWYFDLWGRGTLVTVSSGGGGSGGGGSGGGGSGGGGSDIRVTQSPSSLSASVGDRVTITCRASQSISSYLNWYQQKPGKAPKLLIYAASSLQSGVPSRFSGSGSGTDFTLTISSLQPEDFATYYCQQSYSIPLTFGQGTKVEIK

SEQ ID NO: 860 - protein, 247 aa, Artificial Sequence
  source: /note="Description of Artificial Sequence: Synthetic scFv sequence"
QVQLVQSWAEVKKPGASVKVSCKASGYTFTSYYMHWVRQAPGQGLEWMGIINPSGGSTSYAQKFQGRVTMTRDTSTSTVYMELSNLRSEDTAVYYCARSPRVTTGYFDYWGQGTLVTVSSGGGGSGGGGSGGGGSGGGGSDIQLTQSPSTLSASVGDRVTITCRASQSISSWLAWYQQKPGKAPKLLIYKASSLESGVPSRFSGSGSGTEFTLTISSLQPDDFATYYCQQYSSYPLTFGGGTRLEIK

SEQ ID NO: 861 - protein, 253 aa, Artificial Sequence
  source: /note="Description of Artificial Sequence: Synthetic scFv sequence"
QVQLVQSGAEVRRPGASVKISCRASGDTSTRHYIHWLRQAPGQGPEWMGVINPTTGPATGSPAYAQMLQGRVTMTRDTSTRTVYMELRSLRFEDTAVYYCARSVVGRSAPYYFDYWGQGTLVTVSSGGGGSGGGGSGGGGSGGGGSDIQMTQSPSSLSASVGDRVTITCRASQGISDYSAWYQQKPGKAPKLLIYAASTLQSGVPSRFSGSGSGTDFTLTISYLQSEDFATYYCQQYYSYPLTFGGGTKVDIK

SEQ ID NO: 862 - protein, 249 aa, Artificial Sequence
  source: /note="Description of Artificial Sequence: Synthetic scFv sequence"
QVQLQQSGAEVKKPGASVKVSCKASGYTFTNYYMHWVRQAPGQGLEWMGIINPSGGYTTYAQKFQGRLTMTRDTSTSTVYMELSSLRSEDTAVYYCARIRSCGGDCYYFDNWGQGTLVTVSSGGGGSGGGGSGGGGSGGGGSDIQLTQSPSTLSASVGDRVTITCRASENVNIWLAWYQQKPGKAPKLLIYKSSSLASGVPSRFSGSGSGAEFTLTISSLQPDDFATYYCQQYQSYPLTFGGGTKVDIK

SEQ ID NO: 863 - protein, 246 aa, Artificial Sequence
  source: /note="Description of Artificial Sequence: Synthetic scFv sequence"
QVQLVQSGAEVKKPGAPVKVSCKASGYTFTGYYMHWVRQAPGQGLEWMGWINPNSGGTNYAQKFQGRVTMTRDTSISTAYMELSRLRSDDTAVYYCARGEWDGSYYYDYWGQGTLVTVSSGGGGSGGGGSGGGGSGGGGSDIVLTQTPSSLSASVGDRVTITCRASQSINTYLNWYQHKPGKAPKLLIYAASSLQSGVPSRFSGSGSGTDFTLTISSLQPEDFATYYCQQSFSPLTFGGGTKLEIK

SEQ ID NO: 864 - protein, 242 aa, Artificial Sequence
  source: /note="Description of Artificial Sequence: Synthetic scFv sequence"
QVQLVESGGGLVQPGGSLRLSCAASGFTFSSYWMHWVRQVPGKGLVWVSRINTDGSTTTYADSVEGRFTISRDNAKNTLYLQMNSLRDDDTAVYYCVGGHWAVWGQGTTVTVSSGGGGSGGGGSGGGGSGGGGSDIQMTQSPSTLSASVGDRVTITCRASQSISDRLAWYQQKPGKAPKLLIYKASSLESGVPSRFSGSGSGTEFTLTISSLQPDDFAVYYCQQYGHLPMYTFGQGTKVEIK

SEQ ID NO: 865 - protein, 241 aa, Artificial Sequence
  source: /note="Description of Artificial Sequence: Synthetic scFv sequence"
QVQLVQSGAEVEKPGASVKVSCKASGYTFTDYYMHWVRQAPGQGLEWMGWINPNSGGTNYAQKFQGRVTMTRDTSISTAYMELSRLRSDDTAVYYCASGWDFDYWGQGTLVTVSSGGGGSGGGGSGGGGSGGGGSDIVMTQSPSSLSASVGDRVTITCRASQSIRYYLSWYQQKPGKAPKLLIYTASILQNGVPSRFSGSGSGTDFTLTISSLQPEDFATYYCLQTYTTPDFGPGTKVEIK

SEQ ID NO: 866 - protein, 250 aa, Artificial Sequence
  source: /note="Description of Artificial Sequence: Synthetic scFv sequence"
QVQLVQSGGGVVQPGRSLRLSCAASGFTFSSYAMHWVRQAPGKGLEWVAVISYDGSNKYYADSVKGRFTISRDNSKNTLYLQMNSLRAEDTAVYYCARWKVSSSSPAFDYWGQGTLVTVSSGGGGSGGGGSGGGGSGGGGSEIVLTQSPATLSLSPGERAILSCRASQSVYTKYLGWYQQKPGQAPRLLIYDASTRATGIPDRFSGSGSGTDFTLTINRLEPEDFAVYYCQHYGGSPLITFGQGTRLEIK

SEQ ID NO: 867 - protein, 246 aa, Artificial Sequence
  source: /note="Description of Artificial Sequence: Synthetic scFv sequence"
QVQLQQSGAEVKKPGASVKVSCKTSGYPFTGYSLHWVRQAPGQGLEWMGWINPNSGGTNYAQKFQGRVTMTRDTSISTAYMELSRLRSDDTAVYYCARDHYGGNSLFYWGQGTLVTVSSGGGGSGGGGSGGGGSGGGGSDIQLTQSPSSISASVGDTVSITCRASQDSGTWLAWYQQKPGKAPNLLMYDASTLEDGVPSRFSGSASGTEFTLTVNRLQPEDSATYYCQQYNSYPLTFGGGTKVDIK

SEQ ID NO: 868 - protein, 248 aa, Artificial Sequence
  source: /note="Description of Artificial Sequence: Synthetic scFv sequence"
QVQLVQSGAEVKKPGASVEVSCKASGYTFTSYYMHWVRQAPGQGLEWMGIINPSGGSTGYAQKFQGRVTMTRDTSTSTVHMELSSLRSEDTAVYYCARGGYSSSSDAFDIWGQGTMVTVSSGGGGSGGGGSGGGGSGGGGSDIQMTQSPPSLSASVGDRVTITCRASQDISSALAWYQQKPGTPPKLLIYDASSLESGVPSRFSGSGSGTDFTLTISSLQPEDFATYYCQQFSSYPLTFGGGTRLEIK

SEQ ID NO: 869 - protein, 262 aa, Artificial Sequence
  source: /note="Description of Artificial Sequence: Synthetic scFv sequence"
FGLRWVFLVAILKGVQCEVQLLESGGGLVQPGGSLRLSCAASGFTFSNFGMTWVRQAPGKGLEWVSGVSIRGIATYYADSVKGRFTISRDDSRNTLYLQMNSLRAEDTALYYCATGVRLLGREWGQGTLVTVSSGGGGSGGGGSGGGGSDVVMTQSPLSLPVPLGQPASISCRSSQSLVDNDGNTYLNWFQQRPGQSPRRLIYKVSMRDSGVPDRFTGSGSGTDFTLRISRVEADDVGVYYCMQGTHWPLTFGPGTKVEIKR

SEQ ID NO: 870 - protein, 115 aa, Artificial Sequence
  source: /note="Description of Artificial Sequence: Synthetic scFv sequence"
EVQLVESGGGLVQAGGSLRLSCAASGSTFSQYDVGWYRQAPGKQRELVAFSSSGGRTIYPDSVKGRFTFSRDNTKNTVYLQMTSLKPEDTAVYYCKIDWYLNSYWGQGTQVTVSS

SEQ ID NO: 871 - protein, 114 aa, Artificial Sequence
  source: /note="Description of Artificial Sequence: Synthetic scFv sequence"
EVQLVESGGGLVQAGGSLRLSCAASGVDASNSAMGWYRQAPGKQREWVARITGGGLIAYTDSVKGRFTISRDNAKSTVYLQMNSLEPEDTAVYYCNTINSRDGWGQGTQVTVSS

SEQ ID NO: 872 - protein, 111 aa, Artificial Sequence
  source: /note="Description of Artificial Sequence: Synthetic scFv sequence"
EVQLVESGGGLVQAGGSLTISCAASGITFSDSIVSWYRRARGKQREWVAGISNGGTTKYAESVLGRFTISRDNAKNMVYLQMNGLNPEDTAVYLCKVRQYWGQGTQVTVSS

SEQ ID NO: 873 - protein, 124 aa, Artificial Sequence
  source: /note="Description of Artificial Sequence: Synthetic scFv sequence"
EVQLVESGGGLVQPGGSLRLSCAASGFTFDYYAIGWFRQAPGKAREGVSCISGGDNSTYYADSVKGRFTISRDNAKNTVYLQMNSLKPEDTAVYYCATGGWKYCSGYDPEYIYWGQGTQVTVSS

SEQ ID NO: 874 - protein, 126 aa, Artificial Sequence
  source: /note="Description of Artificial Sequence: Synthetic scFv sequence"
EVQLVESGGGLVQPGGSLRLSCAASGFTLDYYAIGWFRQAPGKEREWASSISSSDGSTYYADSVKGRFTISRDNAKNTVFLQMNSLKPEDTAVYSCAASQAPITIATMMKPFYDYWGQGTQVTVSS

SEQ ID NO: 875 - protein, 123 aa, Artificial Sequence
  source: /note="Description of Artificial Sequence: Synthetic scFv sequence"
EVQLVESGGGLVQPGGSLRLSCAASGFTLDYYAKCWFRQAPGKEREWVSCISSSDGSTYYADSVKGRFTISRDNAKNTVYLQMNSLKPEDTAVYFCAARHGGPLTVEYFFDYWGQGTQVTVSS

SEQ ID NO: 876 - protein, 114 aa, Artificial Sequence
  source: /note="Description of Artificial Sequence: Synthetic scFv sequence"
EVQLVESGGGLVEPGGSLRLSCVASGFTFSSYDMSWVRQAPGKGLEWVSTINSGGGITYRGSVKGRFTISRDNAKNTLYLQMNSLKPEDTAVYYCENGGSSYRRGQGTQVTVSS

SEQ ID NO: 877 - protein, 120 aa, Artificial Sequence
  source: /note="Description of Artificial Sequence: Synthetic scFv sequence"
EVQLVESGGGLVQAGGSLRLSCAASGRTFSSGTMGWFRRAPGKEREFVASIPWSGGRTYYADSVKDRFTISRDNAQNTVFLQMNSLKPEDTAVYYCAFKERSTGWDFASWGQGIQVTVSS

SEQ ID NO: 878 - protein, 119 aa, Artificial Sequence
  source: /note="Description of Artificial Sequence: Synthetic scFv sequence"
EVQLVESGGGLVQAGGSLRLSCAASGSTFSNYVSNYAMGWGRQAPGTQRELVASISNGDTTNYADSVKGRFTISRDNAKNTVYLQMNSLKPEDTAVYYCFEHQVAGLTWGQGTQVTVSS

SEQ ID NO: 879 - protein, 118 aa, Artificial Sequence
  source: /note="Description of Artificial Sequence: Synthetic scFv sequence"
  MOD_RES (27)..(27): Any amino acid
  MOD_RES (32)..(32): Any amino acid
  MOD_RES (75)..(75): Any amino acid
EVQLVESGGGLVQAGGSLRLSCVASGXALKIXVMGWYRQAPGKQRELVAAITSGGRTNYSDSVKGRFTISGDNAXNTVYLQMNSLKSEDTAVYYCREWNSGYPPVDYWGQGTQVTVSS

SEQ ID NO: 880 - protein, 113 aa, Artificial Sequence
  source: /note="Description of Artificial Sequence: Synthetic scFv sequence"
EVQLVESGGGLVQPGGSLRLSCAASGFTFSTYTMIWLRRAPGKGFEWVSTIDKDGNTNYVDSVKGRFAVSRDNTKNTLYLQMNSLKPEDTAMYYCTKHGSSARGQGTRVTVSS

SEQ ID NO: 881 - protein, 127 aa, Artificial Sequence
  source: /note="Description of Artificial Sequence: Synthetic scFv sequence"
EVQLVESGGGLVQTGGSLRLSCAASGFTLDYYGIGWFRQAPGKEREGVSFISGSDGSTYYAESVKGRFTISRDKAKNTVYLQMNSLKPEDTAVYYCAADPWGPPSIATMTSYEYKHWGQGTQVTVSS

SEQ ID NO: 882 - protein, 247 aa, Artificial Sequence
  source: /note="Description of Artificial Sequence: Synthetic scFv sequence"
DIQLTQSPSSLSASVGDRVTITCRASQSISSYLNWYQQKPGKAPKLLIYAASSLQSGVPSRFSGSGSGTDFTLTISSLQPEDFATYYCQQSYSTPRTFGQGTKVEIKRSRGGGGSGGGGSGGGGSLEMAQVQLVQSGAEVKKPGASVKVSCKASGYTFSSYGISWVRQAPGQGLEWMGWISPYNGNTNYAQNLQGRVTMTTDTSTTTAYMELRSLTSDDTAVYYCARYSGYYYVDYWGQGTLVTVSS

SEQ ID NO: 883 - protein, 251 aa, Artificial Sequence
  source: /note="Description of Artificial Sequence: Synthetic scFv sequence"
KLLPVLTQPHSVSESPGKTVTISCTGSSGSIASNFVQWYQQRPGSAPTTVIYDDNQRPSGVPDRFSASIDRSSNSASLTISGLKTDDEADYYCQSYDGSNVIFGGGTKLTVLGSRGGGGSGGGGSGGGGSLEMAEVQLVESGAEVKKPGASVKVSCKASGYTFTSYYMHWVRQAPGQGLEWMGIINPSGGSTSYAQKFQGRVTMTRDTSTSTVYMELSSLRSEDTAVYYCAAGSYYSLDIWGQGTMVTVSS

SEQ ID NO: 884 - protein, 251 aa, Artificial Sequence
  source: /note="Description of Artificial Sequence: Synthetic scFv sequence"
KLLPVLTQPPSVSVAPGKTARITCGGNNIGSKSVHWYQQKPGQAPVLVIYYDSDRPSGIPERFSGSNSGNTATLTISRVEAGDEADYYCQVWDSITDHYVFGTGTKVTVLGSRGGGGSGGGGSGGGGSLEMAEVQLVESGAEVKKPGSSVKVSCKASGGTFSSYAISWVRQAPGQGLEWMGRIIPILGIANYAQKFQGRVTITADKSTSTAYMELSSLRSEDTAVYYCARQGYVWSEMDFWGQGTLVTVSS

SEQ ID NO: 885 - protein, 250 aa, Artificial Sequence
  source: /note="Description of Artificial Sequence: Synthetic scFv sequence"
QAVLTQPPSASGTPGQRVTISCSGSSSNIGSNTVNWYQQLPGTAPKLLIYSNNQRPSGVPDRFSGSKSGTSASLAISGLQSEDEADYYCAAWDDSLNGSYVFGTGTKVTVLGSRGGGGSGGGGSGGGGSLEMAQVQLVQSGAEVRKPGASVKVSCKASGGTFSSYAISWVRQAPGQGLEWMGRIIPILGIANYAQKFQGRVTITADKSTSTAYMELSSLRSEDTAVYYCARHYGQWWDYWGQGTLVTVSS

SEQ ID NO: 886 - protein, 247 aa, Artificial Sequence
  source: /note="Description of Artificial Sequence: Synthetic scFv sequence"
QPVLTQPPSVSVAPGETASVSCGGNNFGSQSVHWYQQKSGQAPLLVIYYDQDRPSEIPARFSGSKSGNTATLTISRVEAGDEADYYCQVWDTYTDHVVFGGGTKLTVLGSRGGGGSGGGGSGGGGSLEMAEVQLVQSGAEVEKPGASVKVSCKASGYTFSSYYMDWVRQAPGQGLEWMGRINPTSGSTTYAQKFQGRVTMTRDTSTFTVYMDLSSLRSEDTAVYYCARSGGGYGDSWGQGTLVTVSS

SEQ ID NO: 887 - protein, 249 aa, Artificial Sequence
  source: /note="Description of Artificial Sequence: Synthetic scFv sequence"
QSVLTQPPSVSGAPGQRVTISCTGSSSNIGAGFDVHWYQQLPGTAPKLLIFGNSNRPSGVPDRFSGSKSGTSASLAITGLQAEDEADYYCQSYDSSLSGYVFGSGTKVTVLGSRGGGGSGGGGSGGGGSLEMAEVQLVESGAEVKKPGSSVKVSCKASGGTFSSYAISWVRQAPGQGLEWMGRIIPIFGIANYAQKFQGRVTITADKSTSTAYMELSSLRSEDTAVYYCARSMWYMDSWGQGTLVTVSS

SEQ ID NO: 888 - protein, 249 aa, Artificial Sequence
  source: /note="Description of Artificial Sequence: Synthetic scFv sequence"
QSVVTQPPAVSGALGQRVTISCTGTTSNIGAGFDVHWYQQRPGAAPKLLISGNTHRPSGVPDRISGSKSGTLASLAITGLQAEDEADYYCQSYDRSLSTILFGGGTKLTVLGSRGGGGSGGGGSGGGGSLEMAQVQLVQSGAEVKKPGSSVKVSCKASGGTFSSHPISWVRQAPGQGLEWMGRIIPMLDIPNNAQKFQGRVTITADKSTDTAYLELSSLTSEDTAVYYCARGLYYYDYWGQGTLVTVSS

SEQ ID NO: 889 - protein, 253 aa, Artificial Sequence
  source: /note="Description of Artificial Sequence: Synthetic scFv sequence"
METDTLLLWVLLLWVPGSTGDIVMTQSPSSLSASVGDRVTITCKASQDVGTAVDWYQQKPGKAPKLLIYWASTRHTGVPDRFTGSGSGTDFTLTISSLQPEDFADYFCQQYNSYPLTFGGGTKLEIKGGGSGGGGEVQLVQSGAEVKKPGASVKISCKTSGYTFTEYTIHWVKQASGKGLEWIGNINPNNGGTTYNQKFEDRATLTVDKSTSTAYMELSSLRSEDTAVYYCAAGWNFDYWGQGTTVTVSSGGC

SEQ ID NO: 890 - protein, 250 aa, Artificial Sequence
  source: /note="Description of Artificial Sequence: Synthetic scFv sequence"
METDTLLLWVLLLWVPGSTGDIVMTQSPSSLSASVGDRVTITCKASQDVGTAVDWYQQKPGKAPKLLIYWASTRHTGVPDRFTGSGSGTDFTLTISSLQPEDFADYFCQQYNSYPLTFGGGTKLEIKSGGGGEVQLVQSGAEVKKPGASVKISCKTSGYTFTEYTIHWVKQASGKGLEWIGNINPNNGGTTYNQKFEDRATLTVDKSTSTAYMELSSLRSEDTAVYYCAAGWNFDYWGQGTTVTVSSGGC

SEQ ID NO: 891 - protein, 253 aa, Artificial Sequence
  source: /note="Description of Artificial Sequence: Synthetic scFv sequence"
METDTLLLWVLLLWVPGSTGEVQLVQSGAEVKKPGASVKISCKTSGYTFTEYTIHWVKQASGKGLEWIGNINPNNGGTTYNQKFEDRATLTVDKSTSTAYMELSSLRSEDTAVYYCAAGWNFDYWGQGTTVTVSSGGGSGGGGDIVMTQSPSSLSASVGDRVTITCKASQDVGTAVDWYQQKPGKAPKLLIYWASTRHTGVPDRFTGSGSGTDFTLTISSLQPEDFADYFCQQYNSYPLTFGGGTKLEIKGGC

SEQ ID NO: 892 - protein, 250 aa, Artificial Sequence
  source: /note="Description of Artificial Sequence: Synthetic scFv sequence"
METDTLLLWVLLLWVPGSTGEVQLVQSGAEVKKPGASVKISCKTSGYTFTEYTIHWVKQASGKGLEWIGNINPNNGGTTYNQKFEDRATLTVDKSTSTAYMELSSLRSEDTAVYYCAAGWNFDYWGQGTTVTVSSSGGGGDIVMTQSPSSLSASVGDRVTITCKASQDVGTAVDWYQQKPGKAPKLLIYWASTRHTGVPDRFTGSGSGTDFTLTISSLQPEDFADYFCQQYNSYPLTFGGGTKLEIKGGC

SEQ ID NO: 893 - protein, 242 aa, Artificial Sequence
  source: /note="Description of Artificial Sequence: Synthetic scFv sequence"
DIQMTQSPSAMSASVGDRVTITCRASKSISKYLAWFQQKPGKVPKLRIHSGSTLQSGVPSRFSGSGSGTEFTLTISSLQPEDFATYYCQQHIEYPWTFGQGTKVEIKRGGGGSGGGGSGGGGSEVQLVQSGAEVKKPGATVKISCKASGYTFTDYYMHWVQQAPGKGLEWMGYFNPYNDYTRYAEKFQGRVTITADTSTDTAYMELSSLRSEDTAVYYCARSDGYYDAMDYWGQGTTVTVSS

SEQ ID NO: 894 - protein, 242 aa, Artificial Sequence
  source: /note="Description of Artificial Sequence: Synthetic scFv sequence"
DIQMTQSPSAMSASVGDRVTITCRASKSISKYLAWFQQKPGKVPKLRIHSGSTLQSGVPSRFSGSGSGTEFTLTISSLQPEDFATYYCQQHIEYPWTFGQGTKVEIKRGGGGSGGGGSGGGGSQVQLVQSGAEVKKPGASVKVSCKASGYTFTDYYMHWVRQAPGQGLEWMGYFNPYNDYTRYAQKFQGRVTMTRDTSISTAYMELSSLRSDDTAVYYCARSDGYYDAMDYWGQGTTVTVSS

SEQ ID NO: 895 - protein, 244 aa, Artificial Sequence
  source: /note="Description of Artificial Sequence: Synthetic scFv sequence"
DVQITQSPSYLAASPGETITINCRASKSISKYLAWYQEKPGKANKLLIHSGSTLQSGIPSRFSGSGSGTDFTLTISSLEPEDFAMYYCQQHIEYPWTFGGGTKLEIKRAGGGGSGGGGSSGGGGSEIQLQQSGPELVKPGASVKMSCKASGYTFTDYYMHWVKQNNGESLEWIGYFNPYNDYTRYNQNFNGKATLTVDKSSSTAYMQLNSLTSEDSAFYYCARSDGYYDAMDYWGQGTSVTVSS

SEQ ID NO: 896 - protein, 245 aa, Artificial Sequence
  source: /note="Description of Artificial Sequence: Synthetic scFv sequence"
EIQLQQSGPELVKPGASVKMSCKASGYTFTDYYMHWVKQNNGESLEWIGYFNPYNDYTRYNQNFNGKATLTVDKSSSTAYMQLNSLTSEDSAFYYCARSDGYYDAMDYWGQGTSVTVSSGGGGSGGGGSSGGGGSDVQITQSPSYLAASPGETITINCRASKSISKYLAWYQEKPGKANKLLIHSGSTLQSGIPSRFSGSGSGTDFTLTISSLEPEDFAMYYCQQHIEYPWTFGGGTKLEIKRAS

SEQ ID NO: 897 - protein, 244 aa, Artificial Sequence
  source: /note="Description of Artificial Sequence: Synthetic scFv sequence"
EVQLVQSGAEVKKPGATVKISCKASGYTFTDYYMHWVQQAPGKGLEWMGYFNPYNDYTRYAEKFQGRVTITADTSTDTAYMELSSLRSEDTAVYYCARSDGYYDAMDYWGQGTTVTVSSGGGGSGGGGSGGGGSDIQMTQSPSAMSASVGDRVTITCRASKSISKYLAWFQQKPGKVPKLRIHSGSTLQSGVPSRFSGSGSGTEFTLTISSLQPEDFATYYCQQHIEYPWTFGQGTKVEIKRAS

SEQ ID NO: 898 - protein, 244 aa, Artificial Sequence
  source: /note="Description of Artificial Sequence: Synthetic scFv sequence"
QVQLVQSGAEVKKPGASVKVSCKASGYTFTDYYMHWVRQAPGQGLEWMGYFNPYNDYTRYAQKFQGRVTMTRDTSISTAYMELSSLRSDDTAVYYCARSDGYYDAMDYWGQGTTVTVSSGGGGSGGGGSGGGGSDIQMTQSPSAMSASVGDRVTITCRASKSISKYLAWFQQKPGKVPKLRIHSGSTLQSGVPSRFSGSGSGTEFTLTISSLQPEDFATYYCQQHIEYPWTFGQGTKVEIKRAS

SEQ ID NO: 899 - protein, 261 aa, Artificial Sequence
  source: /note="Description of Artificial Sequence: Synthetic scFv sequence"
MAQVKLQQSGPELVKPGASVKMSCKASGYTFTSYVMHWVKQSNGKSLEWIGTIDPYYGGTSYNQKFKGKATLTVDKSSTTAYIQLKSLTSEDSAVYYCARWDGYYGGFSYWGQGTMVTVSSGGGGSGGGGSGGGGSDIELTQSPAIMSATLGEKVTMSCRASSNVKYMYWYQQKSGASPKLWIYYTSNLASGVPARFSGSGSGTSYSLTISSVEAEDAATYYCQQFTSSPYTFGSGTKLEIKRAAAGAPVPYPDPLEPRAA

SEQ ID NO: 900 - protein, 265 aa, Artificial Sequence
  source: /note="Description of Artificial Sequence: Synthetic scFv sequence"
MAQVQLQESGPGLVKPSQSLSLTCSVTGYSITSNYWGWIRKFPGNKMEWMGYISYSGSTSYNPSLKSRISITRDTSKNQLFLQLNSVTTEDTATYYCARYSLFNYGRRDYVMDAWGQGTTVTVSSGGGGSGGGGSGGGGSDIELTQSPATMAASPGEKVTITCRASSTVSYMHWFQQKPGASPKPWIYDTSKLASGVPDRFSGSGSGTDFTLTIDPVQADDIATYYCQQSKDDPRTFGGGTKLELKRRPQVRRCRIRIRWNRVPH

SEQ ID NO: 901 - protein, 260 aa, Artificial Sequence
  source: /note="Description of Artificial Sequence: Synthetic scFv sequence"
DIQLTQSPSSLSASVGDRVTITCSASQDISNYLNWYQQKPGKAPKVLIYFTSSLHSGVPSRFSGSGSGTDFTLTISSLQPEDFATYYCQQYSTVPWTFGQGTKVEIKRGSTSGSGKPGSGEGSTKGEVQLVESGGGLVQPGGSLRLSCAASGYDFTHYGMNWVRQAPGKGLEWVGWINTYTGEPTYAADFKRRFTFSLDTSKSTAYLQMNSLRAEDTAVYYCAKYPYYYGTSHWYFDVWGQGTLVTVSSGGGGSGGGGSC

SEQ ID NO: 902 - protein, 251 aa, Artificial Sequence
  source: /note="Description of Artificial Sequence: Synthetic scFv sequence"
QSVLTQPPSVSGAPGQRVTISCTGSSSNIGAGYDVHWYQQLPGTAPKLLIYGNSNRPSGVPDRFSGSKSGTSASLAITGLQAEDEADYYCQSYDSSLSGYVFGTGTKVTVLGSRGGGGSGGGGSGGGGSLEMAQVQLVQSGAEVKKPGSSVKVSCKASGGTFSSYAISWVRQAPGQGLEWMGGIIPIFGKGNYPQKFQGRVTITADESTGTAYMELSSLRSEDTAVYYCARHIPTFSFDYWGQGTLVTVSS

SEQ ID NO: 903 - protein, 257 aa, Artificial Sequence
  source: /note="Description of Artificial Sequence: Synthetic scFv sequence"
QIVLSQSPAILSASPGEKVTMTCRASSSVSYIHWFQQKPGSSPKPWIYATSNLASGVPVRFSGSGSGTSYSLTISRVEAEDAATYYCQQWTSNPPTFGGGTKLEIKRGSTSGSGKPGSGEGSTKGQVQLQQPGAELVKPGASVKMSCKASGYTFTSYNMHWVKQTPGRGLEWIGAIYPGNGDTSYNQKFKGKATLTADKSSSTAYMQLSSLTSEDSAVYYCARSTYYGGDWYFNVWGAGTTVTVSAGGGGSGGGGSC

SEQ ID NO: 904 - protein, 244 aa, Artificial Sequence
  source: /note="Description of Artificial Sequence: Synthetic scFv sequence"
DIKMTQSPSSMYASLGERVTITCKASPDINSYLSWFQQKPGKSPKTLIYRANRLVDGVPSRFSGGGSGQDYSLTINSLEYEDMGIYYCLQYDEFPYTFGGGTKLEMKGSTSGSGKPGSGEGSTKGEVKLVESGGGLVKPGGSLKLSCAASGFTFSSYAMSWVRQIPEKRLEWVASISRGGTTYYPDSVKGRFTISRDNVRNILYLQMSSLRSEDTAMYYCGRYDYDGYYAMDYWGQGTSVTVSS

SEQ ID NO: 905 - protein, 269 aa, Artificial Sequence
  source: /note="Description of Artificial Sequence: Synthetic scFv sequence"
EFGSATMGWSCIILFLVATATGVHSDIKMTQSPSSMYASLGERVTITCKASPDINSYLSWFQQKPGKSPKTLIYRANRLVDGVPSRFSGGGSGQDYSLTINSLEYEDMGIYYCLQYDEFPYTFGGGTKLEMKGSTSGSGKPGSGEGSTKGEVKLVESGGGLVKPGGSLKLSCAASGFTFSSYAMSWVRQIPEKRLEWVASISRGGTTYYPDSVKGRFTISRDNVRNILYLQMSSLRSEDTAMYYCGRYDYDGYYAMDYWGQGTSVTVSS

SEQ ID NO: 906 - protein, 229 aa, Artificial Sequence
  source: /note="Description of Artificial Sequence: Synthetic scFv sequence"
EVQLVESGGGLVKPGGSLRLSCAASGFTFSNAWMSWVRQAPGKGLEWVGRIKSKTDGGTTDYAAPVKGRFTISRDDSKNTLYLQMNSLKTEDTAVYYCARDFGRWSYYFDYWSQGTLVTVSSNIQMTQSPSSLSASVGDRVTITCRASQSINKWLAWYQQKPGKAPKLLIHDASTLESGVPSRFSGSGSGTEFTLTISSLHPDDSATYYCQQLKSPPAQFGEGTKLEIK

SEQ ID NO: 907 - protein, 229 aa, Artificial Sequence
  source: /note="Description of Artificial Sequence: Synthetic scFv sequence"
EVQLVESGGGLVKPGGSLRLSCAASGFTFSNAWMSWVRQAPGKGLEWVGRIKSKTDGGTTDYAAPVKGRFTISRDDSKNTLYLQMNSLKTEDTAVYYCARDFGRWSYYFDYWSQGTLVTVSSNIQMTQSPSSLSASVGDRVTITCRASQSINKWLAWYQQKPGKAPKLLIHDASTLESGVPSRFSGSGSGTEFTLTISSLHPDDSATYYCQQLKSRPLSFGEGTKLEIK

SEQ ID NO: 908 - protein, 232 aa, Artificial Sequence
  source: /note="Description of Artificial Sequence: Synthetic scFv sequence"
EVQLVESGGGLVKPGGSLRLSCAASGFTFSNAWMSWVRQAPGKGLEWVGRIKSKTDGGTTDYAAPVKGRFTISRDDSKNTLYLQMNSLKTEDTAVYYCARDFGRWSYYFDYWSQGTLVTVSSQSVLTQPSSVSGTPGQRVTISCSGSSSNIGSNYVYWYQQLPGTAPKLLIYRNNQRPSGVPDRFSGSKSGTSASLGHQWAPGPRMRLIITAAWDDSLSGVVFGGGTKLTVL

SEQ ID NO: 909 - protein, 232 aa, Artificial Sequence
  source: /note="Description of Artificial Sequence: Synthetic scFv sequence"
EVQLVESGGGLVKPGGSLRLSCAASGFTFSNAWMSWVRQAPGKGLEWVGRIKSKTDGGTTDYAAPVKGRFTISRDDSKNTLYLQMNSLRTEDTAVYYCARDFGRWSYYFDYWSQGTLVTVSSQPVLTQPHSVSESPGKTVTISCTRSSGNIASNFVQWYQRRPDGATTNVIYEDTQRPSGVSGRFSGSIDRSSNSASLTISGLRAEDEADYYCQSYDGRNLMFGGGTKVTVL

SEQ ID NO: 910 - protein, 234 aa, Artificial Sequence
  source: /note="Description of Artificial Sequence: Synthetic scFv sequence"
  MOD_RES (194)..(194): Any amino acid
EVQLVESGGGLVKPGRSLRLSCTASGFTFGDYAMSWFRQAPGKGLEWVGFIRSKAYGGTTEYAASVKGRFTISRDDSKSIAYLQMNSLKTEDTAVYYCAKDFEVREAHLSYFDYWGQGTLVTVSSQSVLTQPPSVSVAPGQTARITCGGNRIGTKAVHWYQQKSGQAPVLVVRDDTDRPSGSLRDSLAPTLGTXAAATLTISGVEAGDEADYYQVWDSSSDHRVFGGGTKLTVL

SEQ ID NO: 911 - protein, 229 aa, Artificial Sequence
  source: /note="Description of Artificial Sequence: Synthetic scFv sequence"
EVQLVESGGGLVQPGRSLRLSCTASGFTFGDYAMSWVRQAPGKGLEWVSSISGSGRSTDHADYVKGRFTISRDNSKNTVYLQMNRLRAEDTAVYYCAKVSNYEYYFDYWAQGTLVTVSSQPVLTQPHSVSESPGKTVTISCTRSSGSIASNYVQWYQQRPGSAPTTVIYEDNQRPSGVPDRFSGSIDSSSNSASLTISGLKTEDEADYYCQSYDSSNHVFGTGTKLTVL

SEQ ID NO: 912 - protein, 229 aa, Artificial Sequence
  source: /note="Description of Artificial Sequence: Synthetic scFv sequence"
EVQLVESGGGLVQPGRSLRLSCTASGFTFGDYAMSWVRQAPGKGLEWVSSISGSGRSTDHADYVKGRFTISRDNSKNTVYLQMNRLRAEDTAVYYCAKVSNYEYYFDYWAQGTLVTVSSQSVLTQPPSVPGTPGQRVTITCSGSRFNIGSNTVNWYQQLPGTAPKLLIYSNNQRPSGVPDRFSGSKSGTSASLAISGLQSEDEADYYCAAWDDSLNGYVFGTGTKLTVL

SEQ ID NO: 913 - protein, 227 aa, Artificial Sequence
  source: /note="Description of Artificial Sequence: Synthetic scFv sequence"
EVQLVESGGGLVQPGRSLRLSCTASGFTFGDYAMSWVRQAPGKGLEWVSSISGSGRSTDHADYVKGRFTISRDNSKNTVYLQMNRLRAEDTAVYYCAKVSNYEYYFDYWAQGTLVTVSSQSVLTQPPSVSVAPGQTARITCGGNNIGSTSVHWFQQKPGQAPVLVVYDDSDRPSGIPERFSGSNSGNTATLTISRVEAGDEADYYCQVWDNDSDHRVFGGGTKLTVL

SEQ ID NO: 914 - protein, 265 aa, Artificial Sequence
  source: /note="Description of Artificial Sequence: Synthetic scFv sequence"
MALPVTALLLPLALLLHAARPQVQLQQSGAELVRPGASVTLSCKASGYTFSDYEMHWVIQTPVHGLEWIGAIDPETGGTAYNQKFKGKAILTADKSSSTAYMELRSLTSEDSAVYYCTGYYDYDSFTYWGQGTLVTVSAGGGGSGGGGSGGGGSDIVMTQSQKIMSTTVGDRVSITCKASQNVDAAVAWYQQKPGQSPKLLIYSASNRYTGVPDRFTGSGSGTDFTLTISNMQSEDLADYFCQQYDIYPYTFGGGTKLEIKRSDP

SEQ ID NO: 915 - protein, 247 aa, Artificial Sequence
  source: /note="Description of Artificial Sequence: Synthetic scFv sequence"
QEQLVESGGRLVTPGGSLTLSCKASGFDFSAYYMSWVRQAPGKGLEWIATIYPSSGKTYYATWVNGRFTISSDNAQNTVDLQMNSLTAADRATYFCARDSYADDGALFNIWGPGTLVTISSGGGGSGGGGSGGGGSELVLTQSPSVSAALGSPAKITCTLSSAHKTDTIDWYQQLQGEAPRYLMQVQSDGSYTKRPGVPDRFSGSSSGADRYLIIPSVQADDEADYYCGADYIGGYVFGGGTQLTVT

SEQ ID NO: 916 - protein, 234 aa, Artificial Sequence
  source: /note="Description of Artificial Sequence: Synthetic scFv sequence"
  MOD_RES (187)..(187): Any amino acid
  MOD_RES (209)..(209): Any amino acid
QITLKESGGGLVKPGGSLRLSCAASGFTFSNAWMSWVRQAPGKGLEWVGRIKSKTDGGTTDYAAPVKGRFTISRDDSKNTLYLQMNSLKTEDTAVYYCARDFGRWSYYFDYWSQGTLVTVSSQSVLTQPPSVSVAPGQTARITCGGNNIGTKSVHWYQQKPGQAPVLVLYDESDRPSGIPERFSGSXAASGNTATLTISRVEAGDEADXAALLQVWDSSSDHYVFGSGTKLTVL

SEQ ID NO: 917 - protein, 242 aa, Artificial Sequence
  source: /note="Description of Artificial Sequence: Synthetic scFv sequence"
  MOD_RES (187)..(187): Any amino acid
  MOD_RES (209)..(209): Any amino acid
  MOD_RES (218)..(218): Any amino acid
  MOD_RES (221)..(221): Any amino acid
  MOD_RES (224)..(224): Any amino acid
  MOD_RES (227)..(227): Any amino acid
QITLKESGGGLVKPGGSLRLSCAASGFTFSNAWMSWVRQAPGKGLEWVGRIKSKTDGGTTDYAAPVKGRFTISRDDSKNTLYLQMNSLKTEDTAVYYCARDFGRWSYYFDYWSQGTLVTVSSQSVLTQPPSVSVAPGQTARITCGGNNIGTKSVHWYQQKPGQAPVLVLYDESDRPSGIPERFSGSXAASGNTATLTISRVEAGDEADXAALLSGVGXAAXAAXAAXAASLCFGSGTKLTVL

SEQ ID NO: 918 - protein, 232 aa, Artificial Sequence
  source: /note="Description of Artificial Sequence: Synthetic scFv sequence"
  MOD_RES (208)..(208): Any amino acid
  MOD_RES (211)..(211): Any amino acid
QITLKESGGGLVKPGGSLRLSCAASGFTFSNAWMSWVRQAPGKGLEWVGRIRSKTDGGTTDYAALVKGRFTISRDDSENTLYLQMNSLKTEDTAVYYCARDFGRWSYYFDYWSQGTLVTVSSSYELTQPPSVSVSPGQTASITCSGDKLGDKYACWYQQKPGQSPVLVIYQDSKRPSGIPERFSGSNSGNTATLTISGTQAMDEADYXAAXAAQAWDSSTVVFGGGTKLTVL

SEQ ID NO: 919 - protein, 234 aa, Artificial Sequence
  source: /note="Description of Artificial Sequence: Synthetic scFv sequence"
  MOD_RES (208)..(208): Any amino acid
  MOD_RES (211)..(211): Any amino acid
  MOD_RES (214)..(214): Any amino acid
QITLKESGGGLVKPGGSLRLSCAASGFTFSNAWMSWVRQAPGKGLEWVGRIRSKTDGGTTDYAALVKGRFTISRDDSENTLYLQMNSLKTEDTAVYYCARDFGRWSYYFDYWSQGTLVTVSSSYELTQPPSVSVSPGQTASITCSGDKLGDKYACWYQQKPGQSPVLVIYQDSKRPSGIPERFSGSNSGNTATLTISGTQAMDEADYXAAXAAXAAAWDSSTVVFGGGTKLTVL

SEQ ID NO: 920 - protein, 228 aa, Artificial Sequence
  source: /note="Description of Artificial Sequence: Synthetic scFv sequence"
QVQLVESGGGLVKPGGSLRLSCAASGFTFSNAWMSWVRQAPGKGLEWVGRIKSKTDGGTTDYAAPVKGRFTISRDDSKNSLYLQMNSLKTEDTAVYYCARDFGRWSYYFDYWGQGTLVTVSSVLTQPPSVSVAPGKTARITCGGNNLGSKNVHWYQQKPGQAPVLVIYDDDNRPSGIPERFSGSNSGNTATLTISRVEAGDEADYYCQVWDSSSRHVVFGGGTKLTVL

SEQ ID NO: 921 - protein, 234 aa, Artificial Sequence
  source: /note="Description of Artificial Sequence: Synthetic scFv sequence"
  MOD_RES (194)..(194): Any amino acid
QVQLVESGGGLVKPGRSLRLSCTASGFTFGDYAMSWFRQAPGKGLEWVGFIRSKAYGGTTEYAASVKGRFTISRDDSKSIAYLQMNSLKTEDTAVYYCAKDFEVREAHLSYFDYWGQGTLVTVSSQSVLTQPPSVSVAPGQTARITCGGNRIGTKAVHWYQQKSGQAPVLVVRDDTDRPSGSLRDSLAPTLGTXAAATLTISGVEAGDEADYYQVWDSSSDHRVFGGGTKLTVL

SEQ ID NO: 922 - protein, 210 aa, Artificial Sequence
  source: /note="Description of Artificial Sequence: Synthetic scFv sequence"
  MOD_RES (208)..(208): Any amino acid
QVTLKESGGGLVKPGGSLRLSCAASGFTFQRLDEWVRQAPGKGLEWVGRIKSKTDGGTTDYAAPVKGRFTISRDDSKNTLYLQMNSLKTEDTAVYYCARDFGRWSYYFDYWSQGTLVTVSSQSALTQDPAVSVALGTDSQDHMPRRQPQKTIMQWYQQKPGQAPALVIYGKNDRPSGIPDRFSGSTSGNTASLTITGAQAEDEADYYXAA

SEQ ID NO: 923 - protein, 229 aa, Artificial Sequence
  source: /note="Description of Artificial Sequence: Synthetic scFv sequence"
QVTLKESGGGLVKPGGSLRLSCAASGFTFSNAWMSWVRQAPGKGLEWVGRIKSKTDGGTTDYAAPVKGRFTISRDDSKNTLYLQMNSLKTEDTAVYYCARDFGRWSYYFDYWSQGTLVTVSSNIQMTQSPSSLSASVGDRVTITCRASQSINKWLAWYQQKPGKAPKLLIHDASTLESGVPSRFSGSGSGTEFTLTISSLHPDDSATYYCQQLKSPPAQFGEGTKLEIK

SEQ ID NO: 924 - protein, 229 aa, Artificial Sequence
  source: /note="Description of Artificial Sequence: Synthetic scFv sequence"
QVTLKESGGGLVKPGGSLRLSCAASGFTFSNAWMSWVRQAPGKGLEWVGRIKSKTDGGTTDYAAPVKGRFTISRDDSKNTLYLQMNSLKTEDTAVYYCARDFGRWSYYFDYWSQGTLVTVSSNIQMTQSPSSLSASVGDRVTITCRASQSINKWLAWYQQKPGKAPKLLIHDASTLESGVPSRFSGSGSGTEFTLTISSLHPDDSATYYCQQLKSRPLSFGEGTKLEIK

SEQ ID NO: 925 - protein, 232 aa, Artificial Sequence
  source: /note="Description of Artificial Sequence: Synthetic scFv sequence"
QVTLKESGGGLVKPGGSLRLSCAASGFTFSNAWMSWVRQAPGKGLEWVGRIKSKTDGGTTDYAAPVKGRFTISRDDSKNTLYLQMNSLKTEDTAVYYCARDFGRWSYYFDYWSQGTLVTVSSQSVLTQPSSVSGTPGQRVTISCSGSSSNIGSNYVYWYQQLPGTAPKLLIYRNNQRPSGVPDRFSGSKSGTSASLGHQWAPGPRMRLIITAAWDDSLSGVVFGGGTKLTVL

SEQ ID NO: 926 - protein, 232 aa, Artificial Sequence
  source: /note="Description of Artificial Sequence: Synthetic scFv sequence"
QVTLKESGGGLVKPGGSLRLSCAASGFTFSNAWMSWVRQAPGKGLEWVGRIKSKTDGGTTDYAAPVKGRFTISRDDSKNTLYLQMNSLRTEDTAVYYCARDFGRWSYYFDYWSQGTLVTVSSQPVLTQPHSVSESPGKTVTISCTRSSGNIASNFVQWYQRRPDGATTNVIYEDTQRPSGVSGRFSGSIDRSSNSASLTISGLRAEDEADYYCQSYDGRNLMFGGGTKVTVL

SEQ ID NO: 927 - protein, 214 aa, Artificial Sequence
  source: /note="Description of Artificial Sequence: Synthetic scFv sequence"
  MOD_RES (4)..(4): Any amino acid
  MOD_RES (13)..(13): Any amino acid
RSPXAARSLGEAXAAVKPGGSLRLSCAASGFTFSNAWMSGSAQAPGKGLEWVGRIKSKTDGGTTDYAAPVKGRFTISRDDSKNTLYLQMNSLKTEDTAVYYCARDFGRWSYYFDYWSQGTLVTVSSEIVMTQSPSFLSASVGDRVTITCRASQGISSYLAWYQQKPGKAPKLLIYAASTLQSGSHQGFSGSGSGTEFTLTISSLQPEDFATYYC

SEQ ID NO: 928 - protein, 255 aa, Artificial Sequence
  source: /note="Description of Artificial Sequence: Synthetic scFv sequence"
DIQMTQSPSSLSASVGDRVTITCSASSSVSYMNWYQQTPGKAPKRWIYDTSKLASGVPSRFSGSGSGTDYTFTISSLQPEDIATYYCQQWSSNPFTFGQGTKLQITRGSTSGSGKPGSGEGSTKGQVQLVQSGGGVVQPGRSLRLSCKASGYTFTRYTMHWVRQAPGKGLEWIGYINPSRGYTNYNQKVKDRFTISRDNSKNTAFLQMDSLRPEDTGVYFCARYYDDHYSLDYWGQGTPVTVSSGGGGSGGGGSC

SEQ ID NO: 929 - protein, 246 aa, Artificial Sequence
  source: /note="Description of Artificial Sequence: Synthetic scFv sequence"
EVQLVETGGGLVQPGKSLELTCATSGFTFNTAWMHWVRQSPDKRLEWIARIKDTSNNYATDYVESMKGRFTISRDDSKGSVNLQMNSLKEEDTATYYCTTDFYDGTYYWNYWGQGVMVTVSSGGGGSGGGGSGGGGSSYELIQPPSAAVTLGNTVSLTCVGDELPKRYAYWYQQKPDQSIVRVIYEDSVRPPGISDRFSGSSSGTTATLTIRDAQNEDEADYYCQSTYGDDKLYIFGGGTKLTVLG

SEQ ID NO: 930 - protein, 257 aa, Artificial Sequence
  source: /note="Description of Artificial Sequence: Synthetic scFv sequence"
DIQMTQSPSSLSASVGDRVTITCRASQDVNTAVAWYQQKPGKAPKLLIYSASFLYSGVPSRFSGSRSGTDFTLTISSLQPEDFATYYCQQHYTTPPTFGQGTKVEIKRGSTSGSGKPGSGEGSTKGEVQLVESGGGLVQPGGSLRLSCAASGFNIKDTYIHWVRQAPGKGLEWVARIYPTNGYTRYADSVKGRFTISADTSKNTAYLQMNSLRAEDTAVYYCSRWGGDGFYAMDYWGQGTLVTVSSGGGGSGGGGSC

SEQ ID NO: 931 - protein, 246 aa, Artificial Sequence
  source: /note="Description of Artificial Sequence: Synthetic scFv sequence"
EVQLLESGGGAVQPGRSLRLSCAASGFTFSSYAMHWVRQAPGKGLEWVAVISYDGSNKYYADSVKGRFTISRDNSKNTLYLQMNSLRAEDTAVYYCASGYSSSWYLDYWGQGTLVTVSSGGGGSGGGGSGGGASDIQMTQSPSSVSASVGDRVTITCQASQDISNYLNWYQQKPGKAPKLLIYDASNLETGVPSRFSGSGSGTDFTFTISSLQPEDIATYYCQQYDNLPLTFGGGTKVEIKRTAAA

SEQ ID NO: 932 - protein, 246 aa, Artificial Sequence
  source: /note="Description of Artificial Sequence: Synthetic scFv sequence"
EVQLLESGGGVVQPGRSLRLSCAASGFTFSSYAMHWVRQAPGKGLEWVAVISYDGSNKYYADSVKGRFTISRDNSKNTLYLQMNSLRAEDTAVYYCAKGGDTYGFLDNWGQGTMVTVSSGGGGSGGGGSGGGASDIQMTQSPSTLSASVGDRVTITCRASQSISSWLAWYQQKPGKAPKLLIYKASSLESGVPSRFSGSGSGTDFTLTISSLQPEDFATYYCQQFNAYPLTFGGGTKVEIKRTAAA

SEQ ID NO: 933 - protein, 249 aa, Artificial Sequence
  source: /note="Description of Artificial Sequence: Synthetic scFv sequence"
EVQLLESGGGVVQPGRSLRLSCAASGFTFSSYGMHWVRQAPGKGLEWVAVISYDGSNKYYADSVKGRFTISRDNSKNTLYLQMNSLRAEDTAVYYCAKDDGAMRYWGQGTMVTVSSGGGGSGGGGSGGGASDIQMTQSPDSLAVSLGERATINCKSSQSVLYSSNNKNYLAWYQQKPGQPPKLLIYWASTRESGVPDRFSGSGSGTDFTLTISSLQAEDVAVYYCQQYYDSPYTFGQGTKVDIKRTAAA

SEQ ID NO: 934 - protein, 247 aa, Artificial Sequence
  source: /note="Description of Artificial Sequence: Synthetic scFv sequence"
  MOD_RES (101)..(101): Any amino acid
EVQLVESGGGVVQPGRSLRLSCAASGFTFSSYAMHWVRQAPGKGLEWVAVISYDGSNKYYADSVKGRFTISRDNSKNTLYLQMNSLRAEDTAVYYCARGYXASSWSQGLWGQGTLVTVSSGGGGSGGGGSGGGASDIQMTQSPSSLSASVRDRVTITCQASQDISNYLNWYQQKPGKAPKLLIYDASNLETGVPSRFSGSGSGTDFTFTISSLQPEDIATYYCQQYDNLPPTFGGGTKVEIKRTAAA

SEQ ID NO: 935 - protein, 252 aa, Artificial Sequence
  source: /note="Description of Artificial Sequence: Synthetic scFv sequence"
EVRLQQSGPDLIKPGASVKMSCKASGYTFTGYVMHWVKQRPGQGLEWIGFINPYNDDIQSNERFRGKATLTSDKSSTTAYMELSSLTSEDSAVYYCARGAGYNFDGAYRFFDFWGQGTTLTVSSGGGGSGGGGSGGGGSDVVMTQSPLSLPVSLGDQASISCRSSQRLVHSNGNTYLHWYLQKPGQSPKLLIYRVSNRFPGVPDRFSGSGSGTDFTLKISRVEAEDLGIYFCSQSTHVPYTFGGGTKLEIKR

SEQ ID NO: 936 - protein, 245 aa, Artificial Sequence
  source: /note="Description of Artificial Sequence: Synthetic scFv sequence"
QVQLVESGAEVKKPGASVKVSCKASGYTFTGYYMHWVRQAPGQGLEWMGRINPNSGGTNYAQKFQGRVTMTRDTSISTAYMELSRLRSDDTAVYYCASGGAGWNWGQGTMVTVSSGGGGSGGGGSGGGASNFMLTQPHSVSESPGKTATISCTRSSGSIASNYVQWYQQRPGSAPTTVIYEDNQRPFGVPDRFSGSIDSSSNSASLTISGLKTEDEADYYCQSHDSSNVVFGGGTQLTVLGQPAA

SEQ ID NO: 937 - protein, 246 aa, Artificial Sequence
  source: /note="Description of Artificial Sequence: Synthetic scFv sequence"
QVQLVESGGGLVQPGRSLRLSCAASGFTFSSYAMHWVRQAPGKGLEWVAVISYDGSSKYYADSVKGRFTISRDNSKNTLYLQMNSLRAEDTAVYYCAKGGGSFGAFDIWGQGTLVTVSSGGGGSGGGGSGGGASDIQMTQSPSSLSASVGDRVTITCRASQSISRYLNWYQQKPGKAPNLLIYAASSLQSGVPSRFSGSGSGTDFTLTISSLQPEDFATYYCQQYNSYPLTFGGGTKLEIKRTAAA

SEQ ID NO: 938 - protein, 244 aa, Artificial Sequence
  source: /note="Description of Artificial Sequence: Synthetic scFv sequence"
QVQLVESGGGVVQPGRPLRLSCAASGFTFSSYAMHWVRQAPGKGLEWVAVISYDGSNKYYADSVKGRFTISRDNSKNTLYLQMNSLRAEDTAVYYCARAGYSYADYWGQGTMVTVSSGGGGSGGGGSGGGASDIQMTQSPSSLSASVGDRVTITCRASQGIRNDLGWYQQKPGKAPKRLIYAASSLQSGVPSRFSGSGSGTEFTLTISSLQPEDFATYYCLQHNSYPLTFGGGTKVDIKRTAAA

SEQ ID NO: 939 - protein, 244 aa, Artificial Sequence
  source: /note="Description of Artificial Sequence: Synthetic scFv sequence"
QVQLVESGGGVVQPGRSLRLSCAAPGFTFSSYGMHWVRQAPGKGLEWVAVISYDGSNKYYADSVKGRFTISRDNSKNTLYLQMNSLRAEDTAVYYCARNKQYGMDVWGQGTLVTVSSGGGGSGGGGSGGGASDIVMTQSPATLSLAPGERATLSCRASQSVGSNLAWYQQKPGQAPSLLIYDASTRATGIPARFSGSGSGTDFTLTISSLQSEDIAVYYCQQYHRWPLTFGGGTKVEIKRTAAA

SEQ ID NO: 940 - protein, 247 aa, Artificial Sequence
  source: /note="Description of Artificial Sequence: Synthetic scFv sequence"
QVQLVESGGGVVQPGRSLRLSCAASGFTFSSYAMHWVRQAPGKGLEWVAVISYDGSNKYYADSVKGRFTISRDNSKNTLYLQMNSLRAEDTAVYYCARAHNSSSWSFDYWGQGTLVTVSSGGGGSGGGGSGGGASDIQMTQSPSSLSASVGDRVTITCRASQSISSYLNWYQQKPGKAPKLLIYDASNLETGVPSRFSGSGSGTDFTFTISSLQPEDIATYYCQQYDNLPLTFGGGTKVDIKRTAAA

SEQ ID NO: 941 - protein, 251 aa, Artificial Sequence
  source: /note="Description of Artificial Sequence: Synthetic scFv sequence"
QVQLVESGGGVVQPGRSLRLSCAASGFTFSSYGMHWVRQAPGKGLEWVAVISYDGSNKYYADSVKGRFTISRDNSKNTLYLQMNSLRAEDTAVYYCAKDLGGSGGAFDIWGQGTLVTVSSGGGGSGGGGSGGGASDIVMTQTPHSLSVTPGQPASISCKSSQSLLYSDGKTYLYWYLQKPGQPPQLLIYEVSNRFSGVPDRFSGSGSGTDFTLKISRVEAEDVGVYYCMQSIQLYTFGQGTKVDIKRTAAA

SEQ ID NO: 942 - protein, 247 aa, Artificial Sequence
  source: /note="Description of Artificial Sequence: Synthetic scFv sequence"
EVQLVESGAEVKKPGASVKVSCKASGYTFTGYYMHWVRQAPGQGLEWMGRINPNSGGTNYAQKFQGRVTMTRDTSISTAYMELSSLRSEDTAVYYCARFGERYAFDIWGQGTLVTVSSGGGGSGGGGSGGGASQSELTQPPSASGSPGQSVTISCTGTSTDVGAFHFVSWYQHTPGKAPKLLISEVRKRASGVPDRFSGSRSGNTASLTVSGLQSEDEADYFCSAYTGSNYVFGSGTKLTVLGQPAA

SEQ ID NO: 943 - protein, 249 aa, Artificial Sequence
  source: /note="Description of Artificial Sequence: Synthetic scFv sequence"
EVQLVESGGGVVQPGGSLRLSCAASGFTFSSYAMSWVRQAPGKGLEWVSAISGSGGSTYYADSVKGRFSISRDNSKNTLYLQMNSLRAEDTAVYYCARTRSSGAFDIWGQGTLVTVSSGGGGSGGGGSGGGASNFMLTQPHSVSESPGKTVTISCTRSSGSIASKYVQWYQQRPGSSPTTVIYEDNQRPSGVPDRFSGSIDTSSNSASLTISGLRTEDEADYYCHSYDSNNHSVFGGGTKVTVLGQPAA

SEQ ID NO: 944 - protein, 251 aa, Artificial Sequence
  source: /note="Description of Artificial Sequence: Synthetic scFv sequence"
EVQLVESGGGVVQPGRSLRLSCAASGFTFSSYAMHWVRQAPGKGLEWVAVISYDGSNKYYADSVKGRFTISRDNSKNTLYLQMNSLRAEDTAVYYCARGGFTVPGGAFDIWGQGTLVTVSSGGGGSGGGGSGGGASNFMLTQPHSVSDSPGKTVTISCTRSSGRIGSNFVQWYQQRPGSSPTTVIYEDDQRPSGVPARFSGSIDSSSNSASLTISGLTTADEAGYYCQSYDASNVIFGGGTKLTVLGQPAA

SEQ ID NO: 945 - protein, 248 aa, Artificial Sequence
  source: /note="Description of Artificial Sequence: Synthetic scFv sequence"
EVQLVQSGAEVKKPGASVKVSCKASGYTFTGYYMHWVRQAPGQGLEWMGWINPNSGGTNYAQKFQGRVTMTRDTSISTAYMELSSLRSEDTAVYYCARDTGPIDYWGQGTMVTVSSGGGGSGGGGSGGGASDIVMTQTPLSLSVTPGQPASISCKSSQSLLHSDGKTYLYWYLQKPGQPPQLLVYEVSNRFSGVPDKFSGSGSGTDFTLKISRVEAEDVGVYYCMQGIQLPPTFGGGTKVDIKRTAAA

SEQ ID NO: 946 - protein, 249 aa, Artificial Sequence
  source: /note="Description of Artificial Sequence: Synthetic scFv sequence"
EVQLVQSGAEVKKPGSSVKVSCEASGYTFTSYAISWVRQAPGQGLEWMGWMNPNSGNTGYAQKFQGRVTMTRNTSISTAYMELSSLRSEDTAVYYCARVSSYYGMDVWGQGTLVTVSSGGGGSGGGGSGGGASNFMLTQPLSVSESPGKTVTISCTRSSGSIASNYVQWYQQRPGSAPTTVIYEDNQRPSGVPDRFSGSIDSSSNSASLTISGLKTEDEADYYCQSYNSSNHWVFGGGTKVTVLGQPAA

SEQ ID NO: 947 - protein, 249 aa, Artificial Sequence
  source: /note="Description of Artificial Sequence: Synthetic scFv sequence"
EVQLVQSGAEVKKPGSSVKVSCKASGGTFSSYAISWVRQAPGQGLEWMGIINPSGGSTSYAQKFQGRVTMTRDTSTSIVYMELSSLRSEDTAVYYCARGVWNSGSYLGFDYWGQGTLVTVSSGGGGSGGGGSGGGASDIQMTQSPSSLSASVGDRVTITCQASQDISNYLNWYQQKPGKAPKLLIYAASSLQSGVPSRFSGSGSGTDFTLTISSLQPEDFATYYCQQSYSTPLTFGGGTKLEIKRTAAA

SEQ ID NO: 948 - protein, 252 aa, Artificial Sequence
  source: /note="Description of Artificial Sequence: Synthetic scFv sequence"
QMQLVQSGAEVKKPGASVKVSCKASGYTFASYYMHWVRQAPGQGLEWMGIINPSGGSTSYAQKFQGRVTMTRDTSTSTVYMELSRLRSDDTAVYYCASNRGGSYKSVGMDVWGQGTTVTVSSGGGGSGGGGSGGGASNFMLTQPQSVSESPGKTVTISCTRSSGNFASKYVQWYQQRPGSSPTTVIYENYQRPSGVPDRFSGSIDSSSNSATLTISGLKTEDEADYYCQSYDEVSVVFGGGTQLTVLGQPAA

SEQ ID NO: 949 - protein, 252 aa, Artificial Sequence
  source: /note="Description of Artificial Sequence: Synthetic scFv sequence"
QVQLQQSGPGLVKPSQTLSLTCAISGDSVSSNSAAWNWIRQSPSRGLEWLGRTYYRSKWYNDYAVSVKSRITINPDTSKNQFSLQLNSVTPEDTAVYYCARDQWLANYYYYGMDVWGQGTLVTVSSGGGGSGGGGSGGGASSYELTQPLSVSVALGQTARITCGGNNIGSKNVHWYQQKPGQAPVLVIYRDNNRPSGIPERFSGSNSGNTATLTISKAQAGDEADYYCQVWDSNSWVFGGGTKLTVLGQPAA

SEQ ID NO: 950 - protein, 246 aa, Artificial Sequence
  source: /note="Description of Artificial Sequence: Synthetic scFv sequence"
QVQLVESGAEVKKPGASVKVSCKASGYTFTGYYMHWVRQAPGQGLEWMGRINPNSGGTNYAQKFQGRVTMTRDTSISTAYMELSRLRSDDTAVYYCASPRGRGSAFDIWGQGTLVTVSSGGGGSGGGGSGGGASSYELTQPPSVSVSPGQTATISCSGDQLGGKYGHWYQKKPGQSPVLVLYQDRKRPAGIPERFSGSSSGNTITLTISGTQAVDEADYYCQAWDTNLGGVFGGGTKVTVLGQPAA

SEQ ID NO: 951 - protein, 249 aa, Artificial Sequence
  source: /note="Description of Artificial Sequence: Synthetic scFv sequence"
QVQLVESGGGLVKPGGSLRLSCAASGFTFSDYYMSWIRQAPGKGLEWVSYISSSGSTIYYADSVEGRFTISRDNAKNSLYLQMNSLRTEDTAVYYCARARVGGMDVWGQGTMVTVSSGGGGSGGGGSGGGASNFMLTQPHSVSESPGKTVTISCTRSSGSIASNYVQWYQQRPGSSPTTVIYEDNQRPSGVPDRFSGSIDSSSNSASLTISGLKTEDEADYYCQSFDADNLHVVFGGGTKLTVLGQPAA

SEQ ID NO: 952 - protein, 240 aa, Artificial Sequence
  source: /note="Description of Artificial Sequence: Synthetic scFv sequence"
QVTLESGPGILPSQTLSLTCSFSGFSLSTSGMGVGWIRQPSGKGLEWLAHIWWDDDKYYNPSLKSQLTISDTSRNQVFLKITSVDTADTATYYCSRRPRGTMDAMDYWGQGTSVTVSSGGGGSGGGGSGGGGSDIVMTQAASSLSASLGDRVTISCRASQDISKYLNWYQQKPDGTVKLLIYYTSRLHSGVPSRFSGSGSGTDYSLTIRNLEQEDIATYFCQQVYTLPWTFGGGTKLEIK

SEQ ID NO: 953 - protein, 245 aa, Artificial Sequence
  source: /note="Description of Artificial Sequence: Synthetic scFv sequence"
QVTLKESGPGILKPSQTLSLTCSFSGFSLNTSGMGVGWIRQPSGKGLEWLAHIWWDDDKYYNPSLKSQLTISKDTSRNQVFLKITSVDTADSATYYCARRASHVSTVDSFDFWGQGTTLTVSSGGGGSGGGGSGGGGSDIQMTQTTSSLSASLGDRVTISCRASQDISNYLNWFQQKPDGTVKLLIYYTSRLHSGVPSKFSGSGSGTDYSLTISNLEQEDIATYFCQQGYTLPWTFGGGTKLEIK

SEQ ID NO: 954 - protein, 242 aa, Artificial Sequence
  source: /note="Description of Artificial Sequence: Synthetic scFv sequence"
QVTLKESGPGILKPSQTLSLTCSFSGFSLNTSGMGVGWIRQPSGKGLEWLAHIWWDDDKYYNPSLKSQLTISKDTSRNQVFLKITSVDTADSATYYCARRASHVSTVDSFDFWGQGTTLTVSSGGGGSGGGGSGGGGSDIQMTQTTSSLSASLGDRVTISCRASQDISNYLNWFQQPDGTVLLIYYTSRLHSGVPSFSGSGSGTDYSLTISNLEQEDIATYFCQQGYTLPWTFGGGTKLEIK

SEQ ID NO: 955 - protein, 243 aa, Artificial Sequence
  source: /note="Description of Artificial Sequence: Synthetic scFv sequence"
QVTLKESGPGILKPSQTLSLTCSFSGFSLSTSGMGVGWIRQPSGKGLEWLAHIWWDDDKYYNPSLKSQLTISKDTSRNQVFLKITSVDTADTATYYCSRRPRGTMDAMDYWGQGTSVTVSSGGGGSGGGGSGGGGSDIVMTQAASSLSASLGDRVTISCRASQDISKYLNWYQQKPDGTVKLLIYYTSRLHSGVPSRFSGSGSGTDYSLTIRNLEQEDIATYFCQQVYTLPWTFGGGTKLEIK

SEQ ID NO: 956 - protein, 247 aa, Artificial Sequence
  source: /note="Description of Artificial Sequence: Synthetic scFv sequence"
EVQLLESGGGLVQPGGSLRLSCAASGFTFSDYYMSWVRQAPGKGLEWVSAIYSGGGSIYYADSVKGRFTISRDNSKNTLYLQMNSLRAEDTAVYYCARDVQWNKAPRFDYWGQGTLVTVSSGGGGSGGGGSGGGGSQSVLTQPPSASGAPGQRVTISCSGSSSNIGSNDVSWYQQLPGTAPKLLIYADSNRPSGVPDRFSGSKSGTSASLAISGLRSEDEADYYCGSWDYSLSGYVFGGGTKLTVLG

SEQ ID NO: 957 - protein, 247 aa, Artificial Sequence
  source: /note="Description of Artificial Sequence: Synthetic scFv sequence"
EVQLLESGGGLVQPGGSLRLSCAASGFTFSGYAMSWVRQAPGKGLEWVSGISHDGGNTYYADSVKGRFTISRDNSKNTLYLQMNSLRAEDTAVYYCARDRRKGPSTEFDYWGQGTLVTVSSGGGGSGGGGSGGGGSQSVLTQPPSLSGTPGQRVTISCTGSSSNIGSNSVSWYQQLPGTAPKLLIYDDNNRPSGVPDRFSGSKSGTSASLAISGLRSEDEADYYCGAWDYSLSAYVFGGGTKLTVLG

SEQ ID NO: 958 - protein, 253 aa, Artificial Sequence
  source: /note="Description of Artificial Sequence: Synthetic scFv sequence"
EVQLLESGGGLVQPGGSLRLSCAASGFTFSGYAMSWVRQAPGKGLEWVSSIYSSSGSKYYADSVKGRFTISRDNSKNTLYLQMNSLRAEDTAVYYCARASSTCTRTWCSYDDAMDVWGQGTLVTVSSGGGGSGGGGSGGGGSQSVLTQPPSASGTPGQRVTISCTGSSSNIGNNAVTWYQQLPGTAPKLLIYDDSHRPSGVPDRFSGSKSGTSASLAISGLRSEDEADYYCGTWDYSLSGYVFGGGTKLTVLG

SEQ ID NO: 959 - protein, 253 aa, Artificial Sequence
  source: /note="Description of Artificial Sequence: Synthetic scFv sequence"
EVQLLESGGGLVQPGGSLRLSCAASGFTFSNYDMSWVRQAPGKGLEWVSGIYPNGGSKYYADSVKGRFTISRDNSKNTLYLQMNSLRAEDTAVYYCARALRQCQRYWCSYADGMDVWGQGTLVTVSSGGGGSGGGGSGGGGSQSVLTQPPSASGTPGQRVTISCTGSSSNIGSNYVSWYQQLPGTAPKLLIYADSQRPSGVPDRFSGSKSGTSASLAISGLRSEDEADYYCGTWDYSLSGYVLGGGTKLTVLG

SEQ ID NO: 960 - protein, 253 aa, Artificial Sequence
  source: /note="Description of Artificial Sequence: Synthetic scFv sequence"
EVQLLESGGGLVQPGGSLRLSCAASGFTFSNYDMSWVRQAPGKGLEWVSLISHGGGNIYYADSVKGRFTISRDNSKNTLYLQMNSLRAEDTAVYYCARVPVMCTNHWCSYANGMDVWGQGTLVTVSSGGGGSGGGGSGGGGSQSVLTQPPSASGTPGQRVIISCSASSSNIGSNAVYWYQQLPGTAPKLLIYSDNQRPSGVPDRFSGSKSGTSASLAISGLRSEDEADYYCGSWDYSLSAYVFGGGTKLTVLG

SEQ ID NO: 961 - protein, 247 aa, Artificial Sequence
  source: /note="Description of Artificial Sequence: Synthetic scFv sequence"
EVQLLESGGGLVQPGGSLRLSCAASGFTFSSYSMSWVRQAPGKGLEWVSGISHGGGNKYYADSVKGRFTISRDNSKNTLYLQMNSLRAEDTAVYYCARDLRANNDTGFDYWGQGTLVTVSSGGGGSGGGGSGGGGTQSVLTQPPSSSGTPGQRVTISCTGSSSNIGSNAVTWYQQLPGTAPKLLIYDDNHRPSGVPDRFSGSKSGTSASLAISGLRSEDEADYYCGAWDYSLNAYVFGGGTKLTVLG

SEQ ID NO: 962 - protein, 247 aa, Artificial Sequence
  source: /note="Description of Artificial Sequence: Synthetic scFv sequence"
EVQLLESGGGLVQTGGSLRLSCAASGFTFSDYAMSWVRQAPGKGLEWVSSIYPGSGSKYYADSVKGRFAISRDNSKNTLYLQMNSLRAEDTAVYYCARDAWFRGHNVFDYWGQGTLVTVSSGGGGSGGGGSGGGGSQSVLTQPPSASGTPGQRVTISCTGSSSNIGSNNVTWYQQLPGTAPKLLIYSDSHRPSGVPDRFSGSKSGTSASLAISGLQSEDEADYYCGSWDYSLSAYVFGGGTKLTVLG

SEQ ID NO: 963 - protein, 253 aa, Artificial Sequence
  source: /note="Description of Artificial Sequence: Synthetic scFv sequence"
EVQLLESGGGLVQTGGSLRLSCAASGFTFSDYAMSWVRQAPGKGLEWVSWIYPGDSSIYYADSVKGRFTISRDNSKNTLYLQMNSLRAEDTAVYYCARLLSIDQAQLHYYYDAMDVWGQGTLVTVSSGGGGSGGGGSGGGGSQSVLTQPPSPSGTPGQRVTISCTGSSSNIGNYYVYWYQQLPGTAPKLLIYANSHRPSGVPDRFSGSKSGTSASLAISGLRSEDEADYYCGSWDDSLSAYVFGGGTKLTVLG

SEQ ID NO: 964 - protein, 251 aa, Artificial Sequence
  source: /note="Description of Artificial Sequence: Synthetic scFv sequence"
AIQMTQSPSSLSASVGDRVTITCRASQSISSYLNWYQQKPGKAPKLLIHAASNLQSGVPSRFSGSGSGTDFTLTISSLQPEDFATYYCQQSYSTPLTFGGGTKVEIKLGSGGSGGGGSGGGGSGGGGSGGSGGEVQLLESGGGLVQPGGSLRLSCAASGFTFSHYEMGWVRQAPGKGLEWVSYISSSGGWTAYADSVKGRFTISRDNSKNTLYLQMNSLRAEDTAVYYCARIGYADAFDIWGQGTTVTVSS

SEQ ID NO: 965 - protein, 248 aa, Artificial Sequence
  source: /note="Description of Artificial Sequence: Synthetic scFv sequence"
EVQLLESGGGLVQPGGSLRLSCAASGFTFSGYIMWWVRQAPGKGLEWVSVISPSGGDTWYADSVKGRFTISRDNSKNTLYLQMNSLRAEDTAVYYCATAGDYWGQGTLVTVSSVGSGGSGGGGSGGGGSGGGGSGGSGGQSELTQPPSASGTPGQRVTISCSGSSSNIGRNPVNWYQHLPGTAPKLLIYGDNQRPSGVPDRFSGSRSGTSASLAISGLQSEDEADYYCAAWDDSLNGVVFGGGTKLTV

SEQ ID NO: 966 - protein, 254 aa, Artificial Sequence
  source: /note="Description of Artificial Sequence: Synthetic scFv sequence"
EVQLLESGGGLVQPGGSLRLSCAASGFTFSKYDMHWVRQAPGKGLEWVSVISPSGGWTSYADSVKGRFTISRDNSKNTLYLQMNSLRAEDTAMYYCARDDYSKGRDAFDIWGQGTLVTVSSVGSGGSGGGGSGGGGSGGGGSGGSGGDIQLTQSPSSLSASVGDRVTITCRASQSISSYLNWYQQKPGKAPKLLIYAASSLQSGVPSRFSGSGSGTDFTLTISSLQPEDFATYYCQQSYSTPYTFGQGTKLEIK

SEQ ID NO: 967 - protein, 252 aa, Artificial Sequence
  source: /note="Description of Artificial Sequence: Synthetic scFv sequence"
EVQLLESGGGLVQPGGSLRLSCAASGFTFSTYDMHWVRQAPGKGLEWVSVISPSGGWTAYADSVKGRFTISRDNSKNTLYLQMNSLRAEDTAVYYCARAAAGYDAFDIWGQGTMVTVSSVGSGGSGGGGSGGGGSGGGGSGGSGGEIVLTQSPSPLSASVGDRVTITCRASHNINKYLNWYQQKPGKAPKLLIFGASSLRSGVPSRFSGSGSGTDFTLTISSLEPEDLATYFCQQTYNTPLTFGGGTKLEIK

SEQ ID NO: 968 - protein, 255 aa, Artificial Sequence
  source: /note="Description of Artificial Sequence: Synthetic scFv sequence"
EVQLLESGGGLVQPGGSLRLSCAASGFTFSWYDMDWVRQAPGKGLEWVSVISPSGGWTAYADSVKGRFTISRDNSKNTLYLQMNSLRAEDTAVYYCARDSSGYYSPDAFDIWGQGTLVTVSSVGSGGSGGGGSGGGGSGGGGSGGSGGNIQMTQSPSSLSASVGDRVTITCRASQSISSYLNWYQQKPGKAPKLLIYDASSLQSGVPLRFSGSGSGTDFTLTISSLQPEDFATYYCQQSYSTPLTFGGGTKVDIK

SEQ ID NO: 969 - protein, 254 aa, Artificial Sequence
  source: /note="Description of Artificial Sequence: Synthetic scFv sequence"
EVQLLESGGGLVQPGGSLRLSCAASGFTFSWYDMVWVRQAPGKGLEWVSVISPSGGWTSYADSVKGRFTISRDNSKNTLYLQMNSLRAEDTAVYYCARDHSGYDSEYFDYWGQGTLVTVSSVGSGGSGGGGSGGGGSGGGGSGGSGGNIQMTQSPSSLSASVGDRVTITCRASQSISSYLNWYQQKPGKAPKLLIYAASSLQSGVPSRFSGSGSGTDFTLTISSLQPEDFATYYCQQSYSTPYTFGQGTKLEIK

SEQ ID NO: 970 - protein, 260 aa, Artificial Sequence
  source: /note="Description of Artificial Sequence: Synthetic scFv sequence"
MDFQVQIFSFLLISASVIMSRGDIQMTQSPSSVSASIGDRVTITCRASQGIDNWLGWYQQKPGKAPKLLIYDASNLDTGVPSRFSGSGSGTYFTLTISSLQAEDFAVYFCQQAKAFPPTFGGGTKVDIKGSTSGSGKPGSGEGSEVQLVQSGGGLVKPGGSLRLSCAASGFTFSSYSMNWVRQAPGKGLEWVSSISSSSSYIYYADSVKGRFTISRDNAKNSLYLQMNSLRAEDTAVYYCARVTDAFDIWGQGTMVTVSS

SEQ ID NO: 971 - protein, 265 aa, Artificial Sequence
  source: /note="Description of Artificial Sequence: Synthetic scFv sequence"
MGWSCIILFLVATATGVHSEVQLVETGGGLVQPGNSLKLSCATSGFIFSTTWMNWIRQTPGKRLEWLAQIEDKSNNYFISYSESVKGRFTISRDDSKSSVYLQMNNLKEEDTAIYYCSWKYRSNYYFDYWGQGVMVTVSSGSTSGSGKPGSGEGSDIVLTQSPALAVSLEQRATISCKTSQNVDYYGISYLHWYQQKPGQQPKLLIYEGSNLASGIPARFSGSGSGTDFTLTIDPVEADDIVTYYCQQSKDYPYTFGAGTKLELK

SEQ ID NO: 972 - protein, 250 aa, Artificial Sequence
  source: /note="Description of Artificial Sequence: Synthetic scFv sequence"
DIQMTQSPSSLSASVGDRVTITCRASQSISSYLNWYQQKPGKAPKLLIYAASSLQSGVPSRFSGSGSGTDFTLTISSLQPEDFATYYCQQSYSTPLTFGGGTKVDIKRSRGGGGSGGGGSGGGGSLEMAQVQLQQSGPGLVKPSQTLSLTCAISGDSVSSNSAAWNWIRQSPSRGLEWLGRTYYGSKWYNDYAVSVKSRITINPDTSKNQFSLQLNSVTPEDTAVYYCARGRLGDAFDIWGQGTMVTVSS

SEQ ID NO: 973 - protein, 246 aa, Artificial Sequence
  source: /note="Description of Artificial Sequence: Synthetic scFv sequence"
DIQMTQSPSTLSASVGDRVTITCRASQNINKWLAWYQQRPGKAPQLLIYKASSLESGVPSRFSGSGSGTEYTLTISSLQPDDFATYYCQQYNSYATFGQGTKVEIKRSRGGGGSGGGGSGGGGSLEMAQVQLVQSGAEVKKPGESLKISCKGSGYNFSNKWIGWVRQLPGRGLEWIAIIYPGYSDITYSPSFQGRVTISADTSINTAYLHWHSLKASDTAMYYCVRHTALAGFDYWGLGTLVTVSS

SEQ ID NO: 974 - protein, 243 aa, Artificial Sequence
  source: /note="Description of Artificial Sequence: Synthetic scFv sequence"
DVQLVQSGAEVKKPGASVKVSCKASGYTFTRYTMHWVRQAPGQGLEWIGYINPSRGYTNYADSVKGRFTITTDKSTSTAYMELSSLRSEDTATYYCARYYDDHYCLDYWGQGTTVTVSSGEGTSTGSGGSGGSGGADDIVLTQSPATLSLSPGERATLSCRASQSVSYMNWYQQKPGKAPKRWIYDTSKVASGVPARFSGSGSGTDYSLTINSLEAEDAATYYCQQWSSNPLTFGGGTKVEIK

SEQ ID NO: 975 - protein, 253 aa, Artificial Sequence
  source: /note="Description of Artificial Sequence: Synthetic scFv sequence"
QAVVTQPPSASGTPGQRVTISCSGSSSNIGSNTVNWYQQVPGTAPKLLIYSNNQRPSGVPDRFSGSKSGTSASLAISGLQSEDEADYYCAAWDDSLNGWVFGGGTKLTVLGSRGGGGSGGGGSGGGGSLEMAQMQLVQSGAEVKEPGESLRISCKGSGYSFTNFWISWVRQMPGKGLEWMGRVDPGYSYSTYSPSFQGHVTISADKSTSTAYLQWNSLKASDTAMYYCARVQYSGYYDWFDPWGQGTLVTVSS

SEQ ID NO: 976 - protein, 251 aa, Artificial Sequence
  source: /note="Description of Artificial Sequence: Synthetic scFv sequence"
QSVLTQPPSVSGAPGQRVTISCTGSSSNIGAGYDVHWYQQLPGTAPKLLIYGNSNRPSGVPDRFSGSKSGTSASLAISGLQSEDEADYYCAAWDDSLNGYVFGTGTKLTVLGSRGGGGSGGGGSGGGGSLEMAEVQLVETGGGLLQPGGSLRLSCAASGFSVSGTYMGWVRQAPGKGLEWVALLYSGGGTYHPASLQGRFIVSRDSSKNMVYLQMNSLKAEDTAVYYCAKGGAGGGHFDSWGQGTLVTVSS

SEQ ID NO: 977 - protein, 249 aa, Artificial Sequence
  source: /note="Description of Artificial Sequence: Synthetic scFv sequence"
QSVVTQPPSVSVAPGKTARITCGRNNIGSKSVHWYQQKPGQAPVLVVYDDSDRPSGIPERFSGSNSGNTATLTISRVEAGDEADYYCQVWDSSSDHVVFGGGTKLTVLGSRGGGGSGGGGSGGSLEMAEVQLVQSGGGVVRPGGSLRLSCAASGFTFDDYGMSWVRQAPGKGLEWVSGINWNGGSTGYADSVRGRFTISRDNAKNSLYLQMNSLRAEDTALYYCARERGYGYHDPHDYWGQGTLVTVSS

SEQ ID NO: 978 - protein, 250 aa, Artificial Sequence
  source: /note="Description of Artificial Sequence: Synthetic scFv sequence"
QTVVTQPPSASGTPGQRVTISCSGSSSNIGSNYVYWYQQLPGTAPKLLIYRSNQRPSGVPDRFSGSKSGTSASLAISGPRSVDEADYYCAAWDDSLNGVVFGGGTKLTVLGSRGGGGSGGGGSGGGSLEMAQVQLVQSGAEVKKPGSSVKVSCKASGGTFSSYAISWVRQAPGQGLEWMGGIIPIFGTANYAQKFQGRVTITADESTSTAYMELSSLRSEDTAVYYCARRIPPYYGMDVWGQGTTVTVSS

SEQ ID NO: 979 - protein, 243 aa, Artificial Sequence
  source: /note="Description of Artificial Sequence: Synthetic scFv sequence"
QLVESGGGLVQPGRSLRLSCTTSGFTFGDYAMIWARQAPGKGLEWVSSISSSSSYIYYADSVKGRFTISRDNAKNSLYLQMNSLRAEDTAVYYCARERYDFWSGMDVWGKGTTVTVSSGGGGSGGGGSGGSAQSALTQPASVSGSPGQSITISCTGTSSDVGSYNLVSWYQQHPGKAPKLMIYEGSKRPSGVSNRFSGSKSGNAASLTISGLQAEDEADYYCQSYDSSLSVVFGGGTKLTVLG

SEQ ID NO: 980 - protein, 258 aa, Artificial Sequence
  source: /note="Description of Artificial Sequence: Synthetic scFv sequence"
SRAAQPAMAQVQLQQSGAELVKPGASVKISCKASGYSFTGYFMNWVKQSHGKSLEWIGRIHPYDGDTFYNQNFKDKATLTVDKSSNTAHMELLSLTSEDFAVYYCTRYDGSRAMDYWGQGTTVTVSSGGGGSGGGGSETGGGGSDIELTQSPASLAVSLGQRAIISCKASQSVSFAGTSLMHWYHQKPGQQPKLLIYRASNLEAGVPTRFSGSGSKTDFTLNIHPVEEEDAATYYCQQSREYPYTFGGGTKLEIKRAA

SEQ ID NO: 981 - protein, 243 aa, Artificial Sequence
  source: /note="Description of Artificial Sequence: Synthetic scFv sequence"
DIQMTQSPSSLSASVGDRVTITCRASQDVNTAVAWYQQKPGKAPKLLIYSASFLYSGVPSRFSGSRSGTDFTLTISSLQPEDFATYYCQQHYTTPPTFGQGTKVEIKGSTSGSGKPGSGEGSGEVQLVESGGGLVQPGGSLRLSCAASGFNIKDTYIHWVRQAPGKGLEWVARIYPTNGYTRYADSVKGRFTISADTSKNTAYLQMNSLRAEDTAVYYCSRWGGDGFYAMDVWGQGTLVTVSS

SEQ ID NO: 982 - DNA, 729 bp, Artificial Sequence
  source: /note="Description of Artificial Sequence: Synthetic scFv sequence"
gatatccagatgacccagtccccgagctccctgtccgcctctgtgggcgatagggtcaccatcacctgccgtgccagtcaggatgtgaatactgctgtagcctggtatcaacagaaaccaggaaaagctccgaaactactgatttactcggcatccttcctttattctggagtcccttctcgcttctctggatctagatctgggacggatttcactctgaccatcagcagtctgcagccggaagacttcgcaacttattactgtcagcaacattatactactcctcccacgttcggacagggtaccaaggtggagatcaaagggtctacatctggatctgggaagccgggttctggtgagggttctggtgaggttcagctggtggagtctggcggtggcctggtgcagccagggggctcactccgtttgtcctgtgcagcttctggcttcaacattaaagacacctatatacactgggtgcgtcaggccccgggtaagggcctggaatgggttgcaaggatttatcctacgaatggttatactagatatgccgatagcgtcaagggccgtttcactataagcgcagacacatccaaaaacacagcctacctgcagatgaacagcctgcgtgctgaggacactgccgtctattattgttctagatggggaggggacggcttctatgctatggacgtgtggggtcaaggaaccctggtcaccgtctcctcg

SEQ ID NO: 983 - protein, 120 aa, Homo sapiens
WRRKRKEKQSETSPKEFLTIYEDVKDLKTRRNHEQEQTFPGGGSTIYSMIQSQSSAPTSQEPAYTLYSLIQPSRKSGSRKRNHSPSFNSTIYEVIGKSQPKAQNPARLSRKELENFDVYS

SEQ ID NO: 984 - protein, 220 aa, Homo sapiens
MLRLLLALNLFPSIQVTGNKILVKQSPMLVAYDNAVNLSCKYSYNLFSREFRASLHKGLDSAVEVCVVYGNYSQQLQVYSKTGFNCDGKLGNESVTFYLQNLYVNQTDIYFCKIEVMYPPPYLDNEKSNGTIIHVKGKHLCPSPLFPGPSKPFWVLVVVGGVLACYSLLVTVAFIIFWVRSKRSRLLHSDYMNMTPRRPGPTRKHYQPYAPPRDFAAYRS

SEQ ID NO: 985 - protein, 187 aa, Homo sapiens
RRACRKRIRQKLHLCYPVQTSQPKLELVDSRPRRSSTQLRSGASVTEPVAEERGLMSQPLMETCHSVGAAYLESLPLQDASPAGGPSSPRDLPEPRVSTEHTNNKIEKIYIMKADTVIVGTVKAELPEGRGLAGPAEPELEEELEADHTPHYPEQETEPPLGSCSDVMLSVEEEGKEDPLPTAASGK

SEQ ID NO: 986 - protein, 187 aa, Homo sapiens; identical to SEQ ID NO: 985

SEQ ID NO: 987 - protein, 54 aa, Homo sapiens
HIWQLRSQCMWPRETQLLLEVPPSTEDARSCQFPEEERGERSAEEKGRLGDLWV

SEQ ID NO: 988 - protein, 60 aa, Homo sapiens
CVKRRKPRGDVVKVIVSVQRKRQEAEGEATVIEALQAPPDVTTVAVEETIPSFTGRSPNH

SEQ ID NO: 989 - protein, 38 aa, Homo sapiens
CWLTKKKYSSSVHDPNGEYMFMRAVNTAKKSRLTDVTL

SEQ ID NO: 990 - protein, 54 aa, Homo sapiens
HLWRRQWRPRRFSALEQGIHPPQAQSKIEELEQEPEPEPEPEPEPEPEPEPEQL

SEQ ID NO: 991 - protein, 42 aa, Homo sapiens
ALYLLRRDQRLPPDAHKPPGGGSFRTPIQEEQADAHSTLAKI

SEQ ID NO: 992 - protein, 37 aa, Homo sapiens
RRDQRLPPDAHKPPGGGSFRTPIQEEQADAHSTLAKI

SEQ ID NO: 993 - protein, 49 aa, Homo sapiens
HQRRKYRSNKGESPVEPAEPCRYSCPREEEGSTIPIQEDYRKPEPACSP

SEQ ID NO: 994 - protein, 111 aa, Homo sapiens
RRHQGKQNELSDTAGREINLVDAKLKSEQTEASTRQNSQVLLSETGIYDNDPDLCFRMQEGSEVYSNPCLEENKPGIVYASLNHSVIGPNSRLARNVKEAPTEYASICVRS

SEQ ID NO: 995 - protein, 111 aa, Homo sapiens
RRHQGKQNELSDTAGREINLVDAHLKSEQTEASTRQNSQVLLSETGIYDNDPDLCFRMQEGSEVYSNPCLEENKPGIVYASLNHSVIGPNSRLARNVKEAPTEYASICVRS

SEQ ID NO: 996 - protein, 114 aa, Homo sapiens
CCLRRHQGKQNELSDTAGREINLVDAHLKSEQTEASTRQNSQVLLSETGIYDNDPDLCFRMQEGSEVYSNPCLEENKPGIVYASLNHSVIGPNSRLARNVKEAPTEYASICVRS

SEQ ID NO: 997 - protein, 44 aa, Homo sapiens
FWVRSKRSRLLHSDYMNMTPRRPGPTRKHYQPYAPPRDFAAYRS

SEQ ID NO: 998 - protein, 41 aa, Homo sapiens
RSKRSRGGHSDYMNMTPRRPGPTRKHYQPYAPPRDFAAYRS

SEQ ID NO: 999 - protein, 43 aa, Homo sapiens
RSKRSRGGHSDYIVINMTPRRPGPTRKHYQPYAPPRDFAAYRS

SEQ ID NO: 1000 - protein, 5 aa, Homo sapiens
DKTHT

SEQ ID NO: 1001 - protein, 4 aa, Homo sapiens
CPPC

SEQ ID NO: 1002 - protein, 15 aa, Homo sapiens
CPEPKSCDTPPPCPR

SEQ ID NO: 1003 - protein, 12 aa, Homo sapiens
ELKTPLGDTTHT

SEQ ID NO: 1004 - protein, 10 aa, Homo sapiens
KSCDKTHTCP

SEQ ID NO: 1005 - protein, 7 aa, Homo sapiens
KCCVDCP

SEQ ID NO: 1006 - protein, 7 aa, Homo sapiens
KYGPPCP

SEQ ID NO: 1007 - protein, 16 aa, Homo sapiens
VEPKSPDKTHTCPPCP

SEQ ID NO: 1008 - protein, 16 aa, Homo sapiens
LDPKSSDKTHTCPPCP

SEQ ID NO: 1009 - protein, 39 aa, Homo sapiens
IEVMYPPPYLDNEKSNGTIIHVKGKHLCPSPLFPGPSKP

SEQ ID NO: 1010 - protein, 12 aa, Homo sapiens
GGAVHTRGLDFA

SEQ ID NO: 1011 - protein, 45 aa, Homo sapiens
TTTPAPRPPTPAPTIASQPLSLRPEACRPAAGGAVHTRGLDFACD

SEQ ID NO: 1012 - DNA, 135 bp, Artificial Sequence
  source: /note="Description of Artificial Sequence: Synthetic Construct"
accacaaccccagcacctcgcccaccaacaccagcaccaaccatcgcatcccagccactgtctctgaggcccgaggcatgtaggcctgcagcaggaggcgccgtgcacaccaggggcctggactttgcctgcgat

SEQ ID NO: 1013 - DNA, 135 bp, Artificial Sequence
  source: /note="Description of Artificial Sequence: Synthetic Construct"
acaacaaccccagcacccagacctccaacacctgcaccaaccatcgcaagccagcctctgtccctgaggcccgaggcatgtaggccagcagcaggaggcgccgtgcacacccggggcctggactttgcctgcgat

SEQ ID NO: 1014 - DNA, 135 bp, Artificial Sequence
  source: /note="Description of Artificial Sequence: Synthetic Construct"
accacaaccccagcaccccgcccaccaacacctgcaccaaccatcgcctcccagccactgtctctgaggcccgaggcatgtaggcctgcagcaggaggcgccgtgcacaccaggggcctggactttgcctgcgat

SEQ ID NO: 1015 - DNA, 135 bp, Artificial Sequence
  source: /note="Description of Artificial Sequence: Synthetic Construct"
accacaaccccagcacccagaccaccaacacctgcaccaaccatcgcaagccagcctctgtccctgcgcccagaggcatgcaggccagcagcaggaggagcagtgcacacccggggcctggacttcgcatgtgat

SEQ ID NO: 1016 - DNA, 135 bp, Artificial Sequence
  source: /note="Description of Artificial Sequence: Synthetic Construct"
accacaaccccagcacctcgcccaccaacaccagcaccaaccatcgcatcccagccactgtctctgcgccccgaggcatgcaggcctgcagcaggcggcgccgtgcacaccaggggcctggacttcgcctgtgat

SEQ ID NO: 1017 - DNA, 135 bp, Artificial Sequence
  source: /note="Description of Artificial Sequence: Synthetic Construct"
accacgacgccagcgccgcgaccaccaacaccggcgcccaccatcgcgtcgcagcccctgtccctgcgcccagaggcgtgccggccagcggcggggggcgcagtgcacacgagggggctggacttcgcctgtgat

SEQ ID NO: 1018 - protein, 48 aa, Homo sapiens
AKPTTTPAPRPPTPAPTIASQPLSLRPEACRPAAGGAVHTRGLDFACD

SEQ ID NO: 1019 - protein, 79 aa, Homo sapiens
TTTPAPRPPTPAPTIASQPLSLRPEACRPAAGGAVHTRGLDFACDEPKSPDKTHTCPPCPAPPVAGPSVFLFPPKPKDT

SEQ ID NO: 1020 - protein, 51 aa, Homo sapiens
PAKPTTTPAPRPPTPAPTIASQPLSLRPEACRPAAGGAVHTRGLDFACDIY

SEQ ID NO: 1021 - protein, 69 aa, Homo sapiens
TTTPAPRPPTPAPTIASQPLSLRPEACRPAAGGAVHTRGLDFACDIYIWAPLAGTCGVLLLSLVITLYC

SEQ ID NO: 1022 - DNA, 207 bp, Homo sapiens
accacaaccccagcacctcgcccaccaacaccagcaccaaccatcgcatcccagccactgtctctgaggcccgaggcatgtaggcctgcagcaggaggcgccgtgcacaccaggggcctggactttgcctgcgatatctatatctgggcaccactggcaggaacatgtggcgtgctgctgctgtccctggtcatcaccctgtattgc

SEQ ID NO: 1023 - DNA, 207 bp, Homo sapiens
accacgacgccagcgccgcgaccaccaacaccggcgcccaccatcgcgtcgcagcccctgtccctgcgcccagaggcgtgccggccagcggcggggggcgcagtgcacacgagggggctggacttcgcctgtgatatctacatctgggcgcccttggccgggacttgtggggtccttctcctgtcactggttatcaccctttactgc

SEQ ID NO: 1024 - DNA, 207 bp, Homo sapiens
accacgacgccagcgccgcgaccaccaacaccggcgcccaccatcgcgtcgcagcccctgtccctgcgcccagaggcgtgccggccagcggcggggggcgcagtgcacacgagggggctggacttcgcctgtgatatctacatctgggcgcccttggccgggacttgtggggtccttctcctgtcactggttatcactttactgccc

SEQ ID NO: 1025 - DNA, 207 bp, Homo sapiens
acaacaaccccagcacccagacctccaacacctgcaccaaccatcgcaagccagcctctgtccctgaggcccgaggcatgtaggccagcagcaggaggcgccgtgcacacccggggcctggactttgcctgcgatatctatatctgggcaccactggcaggaacatgtggcgtgctgctgctgtccctggtcatcaccctgtattgc

SEQ ID NO: 1026 - DNA, 207 bp, Homo sapiens
accacaaccccagcaccccgcccaccaacacctgcaccaaccatcgcctcccagccactgtctctgaggcccgaggcatgtaggcctgcagcaggaggcgccgtgcacaccaggggcctggactttgcctgcgatatctacatctgggcacctctggcaggaacatgtggcgtgctgctgctgtccctggtcatcaccctgtattgc

SEQ ID NO: 1027 - DNA, 207 bp, Homo sapiens
accacaaccccagcacccagaccaccaacacctgcaccaaccatcgcaagccagcctctgtccctgcgcccagaggcatgcaggccagcagcaggaggagcagtgcacacccggggcctggacttcgcatgtgatatctacatctgggcaccactggcaggaacatgcggcgtgctgctgctgtccctggtcatcaccctgtattgt

SEQ ID NO: 1028 - DNA, 207 bp, Homo sapiens
accacaaccccagcacctcgcccaccaacaccagcaccaaccatcgcatcccagccactgtctctgcgccccgaggcatgcaggcctgcagcaggcggcgccgtgcacaccaggggcctggacttcgcctgtgatatctacatctgggcacctctggcaggaacatgcggcgtgctgctgctgtctctggtcatcaccctgtattgt

SEQ ID NO: 1029 - DNA, 207 bp, Homo sapiens
accacaaccccagcacctagaccaccaacaccagcacccaccatcgcctctcagccactgagcctgcgccccgaggcatgtaggcctgcagcaggcggcgccgtgcacaccaggggcctggactttgcctgcgatatctacatctgggcaccactggcaggaacatgtggcgtgctgctgctgtccctggtcatcaccctgtactgc

SEQ ID NO: 1030 - protein, 44 aa, Homo sapiens
TTPAPRPPTPAPTIASQPLSLRPEACRPAAGGAVHTRGLDFACD

SEQ ID NO: 1031 - protein, 47 aa, Homo sapiens
TTTPAPRPPTPAPTIASQPLSLRPEACRPAAGGAVHTRGLDFACDIY

SEQ ID NO: 1032 - protein, 11 aa, Homo sapiens
LDKTHTCPPCP

SEQ ID NO: 1033 - protein, 16 aa, Homo sapiens
GLAVSTISSFFPPGYQ

SEQ ID NO: 1034 - protein, 282 aa, Homo sapiens
RWPESPKAQASSVPTAQPQAEGSLAKATTAPATTRNTGRGGEEKKKEKEKEEQEERETKTPECPSHTQPLGVYLLTPAVQDLWLRDKATFTCFVVGSDLKDAHLTWEVAGKVPTGGVEEGLLERHSNGSQSQHSRLTLPRSLWNAGTSVTCTLNHPSLPPQRLMALREPAAQAPVKLSLNLLASSDPPEAASWLLCEVSGFSPPNILLMWLEDQREVNTSGFAPARPPPQPGSTTFWAWSVLRVPAPPSPQPATYTCVVSHEDSRTLLNASRSLEVSYVTDH

SEQ ID NO: 1035 - protein, 246 aa, Homo sapiens
YVTVSSQDPAEPKSPDKTHTCPPCPAPELLGGPSVFLFPPKPKDTLMISRTPEVTCVVVDVSHEDPEVKFNWYVDGVEVHNAKTKPREEQYNSTYRVVSVLTVLHQDWLNGKEYKCKVSNKALPAPIEKTISKAKGQPREPQVYTLPPSRDELTKNQVSLTCLVKGFYPSDIAVEWESNGQPENNYKTTPPVLDSDGSFFLYSKLTVDKSRWQQGNVFSCSVMHEALHNHYTQKSLSLSPGKKDPK

SEQ ID NO: 1036 - protein, 45 aa, Homo sapiens
KPTTTPAPRPPTPAPTIASQPLSLRPEACRPAAGGAVHTRGLDFA

SEQ ID NO: 1037 - protein, 16 aa, Homo sapiens
LEPKSCDKTHTCPPCP

SEQ ID NO: 1038 - protein, 43 aa, Homo sapiens
KPTTTPAPRPPTPAPTIASQPLSLRPEACRPAAGGAVHTRGLD

SEQ ID NO: 1039 - protein, 15 aa, Homo sapiens
EPKSCDKTHTCPPCP

SEQ ID NO: 1040 - protein, 16 aa, Homo sapiens
ELKTPLGDTHTCPRCP

SEQ ID NO: 1041 - protein, 15 aa, Homo sapiens
EPKSCDTPPPCPRCP

SEQ ID NO: 1042 - protein, 12 aa, Homo sapiens
ESKYGPPCPSCP

SEQ ID NO: 1043 - protein, 12 aa, Homo sapiens
ERKCCVECPPCP

SEQ ID NO: 1044 - protein, 229 aa, Homo sapiens
ESKYGPPCPPCPAPEFLGGPSVFLFPPKPKDTLMISRTPEVTCVVVDVSQEDPEVQFNWYVDGVEVHNAKTKPREEQFNSTYRVVSVLTVLHQDWLNGKEYKCKVSNKGLPSSIEKTISKAKGQPREPQVYTLPPSQEEMTKNQVSLTCLVKGFYPSDIAVEWESNGQPENNYKTTPPVLDSDGSFFLYSRLTVDKSRWQEGNVFSCSVMHEALHNHYTQKSLSLSLGK

SEQ ID NO: 1045 - protein, 119 aa, Homo sapiens
ESKYGPPCPPCPGQPREPQVYTLPPSQEEMTKNQVSLTCLVKGFYPSDIAVEWESNGQPENNYKTTPPVLDSDGSFFLYSRLTVDKSRWQEGNVFSCSVMHEALHNHYTQKSLSLSLGK

SEQ ID NO: 1046 - protein, 281 aa, Homo sapiens
RWPESPKAQASSVPTAQPQAEGSLAKATTAPATTRNTGRGGEEKKKEKEKEEQEERETKTPECPSHTQPLGVYLLTPAVQDLWLRDKATFTCFVVGSDLKDAHLTWEVAGKVPTGGVEEGLLERHSNGSQSQHSRLTLPRSLWNAGTSVTCTLHPSLPPQRLMALREPAAQAPVKLSLNLLASSDPPEAASWLLCEVSGFSPPNILLMWLEDQREVNTSGFAPARPPPQPGSTTFWAWSVLRVPAPPSPQPATYTCVVSHEDSRTLLNASRSLEVSYVTDH

SEQ ID NO: 1047 - protein, 283 aa, Homo sapiens
RWPESPKAQASSVPTAQPQAEGSLAKATTAPATTRNTGRGGEEKKKEKEKEEQEERETKTPECPSHTQPLGVYLLTPAVQDLWLRDKATFTCFVVGSDLKDAHLTWEVAGKVPTGGVEEGLLERHSNGSQSQHSRLTLPRSLWNAGTSVTCTLNHPSLPPQRLMALREPAAQAPVKLSLNLLASSDPPEAASWLLCEVSGFSPPNILLMVVLEDQREVNTSGFAPARPPPQPGSTTFWAWSVLRVPAPPSPQPATYTCVVSHEDSRTLLNASRSLEVSYVTDH

SEQ ID NO: 1048 - protein, 58 aa, Homo sapiens
ESPKAQASSVPTAQPQAEGSLAKATTAPATTRNTGRGGEEKKKEKEKEEQEERETKTP

SEQ ID NO: 1049 - protein, 234 aa, Homo sapiens
AEPKSPDKTHTCPPCPAPPVAGPSVFLFPPKPKDTLMIARTPEVTCVVVDVSHEDPEVKFNWYVDGVEVHNAKTKPREEQYNSTYRVVSVLTVLHQDWLNGKEYKCKVSNKALPAPIEKTISKAKGQPREPQVYTLPPSRDELTKNQVSLTCLVKGFYPSDIAVEWESNGQPENNYKTTPPVLDSDGSFFLYSKLTVDKSRWQQGNVFSCSVMHEALHNHYTQKSLSLSPGKKD

SEQ ID NO: 1050 - protein, 234 aa, Homo sapiens; identical to SEQ ID NO: 1049

SEQ ID NO: 1051 - protein, 20 aa, Homo sapiens
AEPKSPDKTHTCPPCPKDPK

SEQ ID NO: 1052 - protein, 233 aa, Homo sapiens
EPKSPDKTHTCPPCPAPPVAGPSVFLFPPKPKDTLMIARTPEVTCVVVDVSHEDPEVKFNWYVDGVEVHNAKTKPREEQYNSTYRVVSVLTVLHQDWLNGKEVKCKVSNKALPAPIEKTISKAKGQPREPQVYTLPPSRDELTKNQVSLTCLVKGFYPSDIAVEWESNGQPENNYKTTPPVLDSDGSFFLVSKLTVDKSRWQQGNVFSCSVMHEALHNHYTQKSLSLSPGKKD

SEQ ID NO: 1053 - protein, 13 aa, Homo sapiens
SVFLFPPKPKDTL

SEQ ID NO: 1054 - protein, 231 aa, Homo sapiens
EPKSPDKTHTCPPCPAPPVAGPSVFLFPPKPKDTLMIARTPEVTCVVVDVSHEDPEVKFNWYVDGVEVHNAKTKPREEQYNSTYRVVSVLTVLHQDWLNGKEYKCKVSNKALPAPIEKTISKAKGQPREPQVYTLPPSRDELTKNQVSLTCLVKGFYPSDIAVEWESNGQPENNYKTTPPVLDSDGSFFLYSKLTVDKSRWQQGNVFSCSVMHEALHNHYTQKSLSLSPGK

SEQ ID NO: 1055 - protein, 235 aa, Homo sapiens
EPKSPDKTHTCPPCPAPPVAGPSVFLFPPKPKDTLMIARTPEVTCVVVDVSHEDPEVKFNWYVDGVEVHNAKTKPREEQYNSTYRVVSVLTVLHQDWLNGKEYKCKVSNKALPAPIEKTISKAKGQPREPQVYTLPPSRDELTKNQVSLTCLVKGFYPSDIAVEWESNGQPENNYKTTPPVLDSDGSFFLYSKLTVDKSRWQQGNVFSCSVMHEALHNHYTQKSLSLSPGKKDPK

SEQ ID NO: 1056 - protein, 223 aa, Homo sapiens
VECPPCPAPPVAGPSVFLFPPKPKDTLMISRTPEVTCVVVDVSHEDPEVKFNWYVDGVEVHNAKTKPREEQYNSTYRVVSVLTVLHQDWLNGKEYKCKVSNKGLPSSIEKTISKAKGQPREPQVYTLPPSREEMTKNQVSLTCLVKGFYPSDIAVEWESNGQPENNYKTTPPVLDSDGSFFLYSKLTVDKSRWQQGNVFSCSVMHEALHNHYTQKSLSLSPGK

SEQ ID NO: 1057 - protein, 235 aa, Homo sapiens
DPAEPKSPDKTHTCPPCPAPPVAGPSVFLFPPKPKDTLMIARTPEVTCVVVDVSHEDPEVKFNWYVDGVEVHNAKTKPREEQYNSTYRVVSVLTVLHQDWLNGKEYKCKVSNKALPAPIEKTISKAKGQPREPQVYTLPPSRDELTKNQVSLTCLVKGFYPSDIAVEWESNGQPENNYKTTPPVLDSDGSFFLYSKLTVDKSRWQQGNVFSCSVMHEALHNHYTQKSLSLSPGKK

SEQ ID NO: 1058 - protein, 17 aa, Homo sapiens
ELKTPLGDTTHTCPRCP

SEQ ID NO: 1059 - protein, 61 aa, Homo sapiens
ELKTPLGDTHTCPRCPEPKSCDTPPPCPRCPEPKSCDTPPPCPRCPEPKSCDTPPPCPRCP

SEQ ID NO: 1060 - protein, 230 aa, Homo sapiens
ESKYGPPCPPCPAPEFLGGPSVFLFPPKPKDTLMISRTPEVTCVVVDVSQEDPEVQFNWYVDGVEVHNAKTKPREEQFNSTYRVVSVLTVLHQDWLNGKEYKCKVSNKGLPSSIEKTISKAKGQPREPQVYTLPPSQEEMTKNQVSLTCLVKGFYPSDIAVEWESNGQPENNYKTTPPVLDSDGSFFLYSRLTVDKSRWQEGNVFSCSVMHEALHNHYTQKSLSLSLGKM

SEQ ID NO: 1061 - protein, 230 aa, Homo sapiens
ESKYGPPCPPCPAPEFEGGPSVFLFPPKPKDTLMISRTPEVTCVVVDVSQEDPEVQFNWYVDGVEVHNAKTKPREEQFQSTYRVVSVLTVLHQDWLNGKEYKCKVSNKGLPSSIEKTISKAKGQPREPQVYTLPPSQEEMTKNQVSLTCLVKGFYPSDIAVEWESNGQPENNYKTTPPVLDSDGSFFLYSRLTVDKSRWQEGNVFSCSVMHEALHNHYTQKSLSLSLGKM

SEQ ID NO: 1062 - protein, 12 aa, Homo sapiens
SPNMVPHAHHAQ

SEQ ID NO: 1063 - protein, 107 aa, Homo sapiens
GQPREPQVYTLPPSQEEMTKNQVSLTCLVKGFYPSDIAVEWESNGQPENNYKTTPPVLDSDGSFFLYSRLTVDKSRWQEGNVFSCSVMHEALHNHYTQKSLSLSLGK

SEQ ID NO: 1064 - protein, 129 aa, Homo sapiens
ESKYGPPCPPCPGGGSSGGGSGGQPREPQVYTLPPSQEEMTKNQVSLTCLVKGFYPSDIAVEWESNGQPENNYKTTPPVLDSDGSFFLYSRLTVDKSRWQEGNVFSCSVMHEALHNHYTQKSLSLSLGK

SEQ ID NO: 1065 - protein, 229 aa, Homo sapiens
ESKYGPPCPSCPAPEFEGGPSVFLFPPKPKDTLMISRTPEVTCVVVDVSQEDPEVQFNWYVDGVEVHQAKTKPREEQFNSTYRVVSVLTVLHQDWLNGKEYKCKVSNKGLPSSIEKTISKAKGQPREPQVYTLPPSQEEMTKNQVSLTCLVKGFVPSDIAVEWESNGQPENNYKTTPPVLDSDGSFFLYSRLTVDKSRWQEGNVFSCSVMHEALHNHYTQKSLSLSLGK

SEQ ID NO: 1066 - protein, 229 aa, Homo sapiens
ESKYGPPCPPCPAPEFEGGPSVFLFPPKPKDTLMISRTPEVTCVVVDVSQEDPEVQFNWYVDGVEVHQAKTKPREEQFNSTYRVVSVLTVLHQDWLNGKEYKCKVSNKGLPSSIEKTISKAKGQPREPQVYTLPPSQEEMTKNQVSLTCLVKGFVPSDIAVEWESNGQPENNYKTTPPVLDSDGSFFLYSRLTVDKSRWQEGNVFSCSVMHEALHNHYTQKSLSLSLGK

SEQ ID NO: 1067 - DNA, 36 bp, Homo sapiens
gaatctaagtacggaccgccctgccccccttgccct

SEQ ID NO: 1068 - protein, 12 aa, Homo sapiens
ESKYGPPCPPCP

SEQ ID NO: 1069 - protein, 9 aa, Homo sapiens
YGPPCPPCP

SEQ ID NO: 1070 - protein, 10 aa, Homo sapiens
KYGPPCPPCP

SEQ ID NO: 1071 - protein, 13 aa, Homo sapiens
EVVKYGPPCPPCP

SEQ ID NO: 1072 - protein, 229 aa, Homo sapiens
ESKYGPPCPSCPAPEFLGGPSVFLFPPKPKDTLMISRTPEVTCVVVDVSQEDPEVQFNWYVDGVEVHNAKTKPREEQFNSTYRVVSVLTVLHQDWLNGKEYKCKVSNKGLPSSIEKTISKAKGQPREPQVYTLPPSQEEMTKNQVSLTCLVKGFYPSDIAVEWESNGQPENNYKTTPPVLDSDGSFFLYSRLTVDLSRWQEGNVFSCSVMHEALHNHYTQKSLSLSLGK

SEQ ID NO: 1073 - protein, 22 aa, Homo sapiens
ESKYGPPCPPCPGGGSSGGGSG

SEQ ID NO: 1074 - protein, 231 aa, Homo sapiens
EPKSPDKTHTCPPCPAPPVAGPSVFLFPPKPKDTLMIARTPEVTCVVVDVSHEDPEVKFNWYVDGVEVHNAKTKPREEQYNSTYRVVSVLTVLHQDWLNGKEYKCKVSNKALPAPIEKTISKAKGQPREPQVYTLPPSRDELTKNQVSLTCLVKGFYPSDIAVEWESNGQPENNYKTIPPVLDSDGSFFLYSKLTVDKSRWQQGNVFSCSVMHEALHNHYTQKSLSLSPGK

SEQ ID NO: 1075 - protein, 231 aa, Homo sapiens
EPKSPDKTHTCPPCPAPPVAGPSVFLFPPKPKDTLMIARTPEVTCVVVDVSHEDPEVKFNWYVDGVEVHNAKTKPREEQYNSTYRVVSVLTVLHQDWLNGKEYKCKVSNKALPAPLEKTISKAKGQPREPQVYTLPPSRDELTKNQVSLTCLVKGFYPSDIAVEWESNGQPENNYKTIPPVLDSDGSFFLYSKLTVDKSRWQQGNVFSCSVMHEALHNHYTQKSLSLSPGK

SEQ ID NO: 1076 - protein, 236 aa, Homo sapiens
EPKSCDKTHTCPPCPAPELLGGPSVFLFPPKPKDTLMISRTPEVTCVVVDVSHEDPEVKFNWYVDGVEVHNAKTKPREEQYNSTYRVVSVLTVLHQDWLNGKEYKCKVSNKALPAPIEKTISKAKGQPREPQVYTLPPSRDELTKNQVSLTCLVKGFYPSDIAVEWESNGQPENNYKTTPPVLDSDGSFFLYSKLTVDKSRWQQGNVFSCSVMHEALHNHYTQKSLSLSPGKKDPK

SEQ ID NO: 1077 - DNA, 135 bp, Artificial Sequence; identical to SEQ ID NO: 1017
  source: /note="Description of Artificial Sequence: Synthetic polynucleotide"

SEQ ID NO: 1078 - DNA, 690 bp, Artificial Sequence
  source: /note="Description of Artificial Sequence: Synthetic polynucleotide"
gagagcaagtacggccctccctgccccccttgccctgcccccgagttcctgggcggacccagcgtgttcctgttcccccccaagcccaaggacaccctgatgatcagccggacccccgaggtgacctgtgtggtggtggacgtgtcccaggaggaccccgaggtccagttcaactggtacgtggacggcgtggaggtgcacaacgccaagaccaagccccgggaggagcagttcaatagcacctaccgggtggtgtccgtgctgaccgtgctgcaccaggactggctgaacggcaaggaatacaagtgtaaggtgtccaacaagggcctgcccagcagcatcgagaaaaccatcagcaaggccaagggccagcctcgggagccccaggtgtacaccctgccccctagccaagaggagatgaccaagaaccaggtgtccctgacctgcctggtgaagggcttctaccccagcgacatcgccgtggagtgggagagcaacggccagcccgagaacaactacaagaccaccccccctgtgctggacagcgacggcagcttcttcctgtacagccggctgaccgtggacaagagccggtggcaggagggcaacgtctttagctgctccgtgatgcacgaggccctgcacaaccactacacccagaagagcctgagcctgtccctgggcaagatg

SEQ ID NO: 1079 - DNA, 847 bp, Artificial Sequence
  source: /note="Description of Artificial Sequence: Synthetic polynucleotide"
aggtggcccgaaagtcccaaggcccaggcatctagtgttcctactgcacagccccaggcagaaggcagcctagccaaagctactactgcacctgccactacgcgcaatactggccgtggcggggaggagaagaaaaaggagaaagagaaagaagaacaggaagagagggagaccaagacccctgaatgtccatcccatacccagccgctgggcgtctatctcttgactcccgcagtacaggacttgtggcttagagataaggccacctttacatgtttcgtcgtgggctctgacctgaaggatgcccatttgacttgggaggttgccggaaaggtacccacagggggggttgaggaagggttgctggagcgccattccaatggctctcagagccagcactcaagactcacccttccgagatccctgtggaacgccgggacctctgtcacatgtactctaaatcatcctagcctgcccccacagcgtctgatggcccttagagagccagccgcccaggcaccagttaagcttagcctgaatctgctcgccagtagtgatcccccagaggccgccagctggctcttatgcgaagtgtccggctttagcccgcccaacatcttgctcatgtggctggaggaccagcgagaagtgaacaccagcggcttcgctccagcccggcccccaccccagccgggttctaccacattctgggcctggagtgtcttaagggtcccagcaccacctagcccccagccagccacatacacctgtgttgtgtcccatgaagatagcaggaccctgctaaatgcttctaggagtctggaggtttcctacgtgactgaccatt

SEQ ID NO: 1080 - protein, 619 aa, Homo sapiens
MPDPAAHLPFFYGSISRAEAEEHLKLAGMADGLFLLRQCLRSLGGYVLSLVHDVRFHHFPIERQLNGTYAIAGGKAHCGPAELCEFYSRDPDGLPCNLRKPCNRPSGLEPQPGVFDCLRDAMVRDYVRQTWKLEGEALEQAIISQAPQVEKLIATTAHERMPWYHSSLTREEAERKLYSGAQTDGKFLLRPRKEQGTYALSLIYGKTVYHYLISQDKAGKYCIPEGTKFDTLWQLVEYLKLKADGLIYCLKEACPNSSASNASGAAAPTLPAHPSTLTHPQRRIDTLNSDGYTPEPARITSPDKPRPMPMDTSVYESPYSDPEELKDKKLFLKRDNLLIADIELGCGNFGSVRQGVYRMRKKQIDVAIKVLKQGTEKADTEEMMREAQIMHQLDNPYIVRLIGVCQAEALMLVMEMAGGGPLHKFLVGKREEIPVSNVAELLHQVSMGMKYLEEKNFVHRDLAARNVLLVNRHYAKISDFGLSKALGADDSYYTARSAGKWPLKWYAPECINFRKFSSRSDVWSYGVTMWEALSYGQKPYKKMKGPEVMAFIEQGKRMECPPECPPELYALMSDCWIYKWEDRPDFLTVEQRMRACYYSLASKVEGPPGSTQKAEAACA

SEQ ID NO: 1081 - protein, 180 aa, Homo sapiens
MLRLLLALNLFPSIQVTGNKILVKQSPMLVAYDNAVNLSCKYSYNLFSREFRASLHKGLDSAVEVCVVYGNYSQQLQVYSKTGFNCDGKLGNESVTFYLQNLYVNQTDIYFCKIEVMYPPPYLDNEKSNGTIIHVKGKHLCPSPLFPGPSKPFWVLVVVGGVLACYSLLVTVAFIIFWVR

SEQ ID NO: 1082 - protein, 240 aa, Homo sapiens
MGNSCYNIVATLLLVLNFERTRSLQDPCSNCPAGTFCDNNRNQICSPCPPNSFSSAGGQRTCDICRQCKGVFRTRKECSSTSNAECDCTPGFHCLGAGCSMCEQDCKQGQELTKKGCKDCCFGTFNDQKRGICRPWTNCSLDGKSVLVNGTKERDVVCGPSPADLSPGASSVTPPAPAREPGHSPQIISFFLALTSTALLFLLFFLTLRFSVVKRGRKKLLYIFKQPFMRPVQTTQEEDG

SEQ ID NO: 1083 - protein, 21 aa, Homo sapiens
DGVYTGLSTRNQETYETLKHE

SEQ ID NO: 1084 - protein, 66 aa, Homo sapiens
DPKLCYILDAILFLYGIVLTLLYCRLKIQVRKAAITSYEKSDGVYTGLSTRNQETYETLKHEKPPQ

SEQ ID NO: 1085 - protein, 21 aa, Homo sapiens
DGVYTGLSTRNQETYETLKHE

SEQ ID NO: 1086 - protein, 67 aa, Homo sapiens
IEVMYPPPYLDNEKSNGTIIHVKGKHLCPSPLFPGPSKPFWVLVVVGGVLACYSLLVTVAFIIFWVR

SEQ ID NO: 1087 - protein, 219 aa, Homo sapiens
IEVMYPPPYLDNEKSNGTIIHVKGKHLCPSPLFPGPSKPFWVLVVVGGVLACYSLLVTVAFIIFWVRSKRSRLLHSDYMNMTPRRPGPTRKHYQPYAPPRDFAAYRSRVKFSRSADAPAYQQGQNQLYNELNLGRREEYDVLDKRRGRDPEMGGKPRRKNPQEGLYNELQKDKMAEAYSEIGMKGERRRGKGHDGLYQGLSTATKDTYDALHMQALPPR

SEQ ID NO: 1088 - protein, 283 aa, Homo sapiens
FVPVFLPAKPTTTPAPRPPTPAPTIASQPLSLRPEACRPAAGGAVHTRGLDFACDIYIWAPLAGTCGVLLLSLVITLYCNHRNRSKRSRLLHSDYMNMTPRRPGPTRKHYQPYAPPRDFAAYRSRFSVVKRGRKKLLYIFKQPFMRPVQTTQEEDGCSCRFPEEEEGGCELRVKFSRSADAPAYQQGQNQLYNELNLGRREEYDVLDKRRGRDPEMGGKPRRKNPQEGLYNELQKDKMAEAYSEIGMKGERRRGKGHDGLYQGLSTATKDTYDALHMQALPPR

SEQ ID NO: 1089 - protein, 48 aa, Artificial Sequence
  source: /note="Description of Artificial Sequence: Synthetic polypeptide"
QRRKYRSNKGESPVEPAEPCRYSCPREEEGSTIPIQEDYRKPEPACSP

SEQ ID NO: 1090 - DNA, 123 bp, Artificial Sequence
  source: /note="Description of Artificial Sequence: Synthetic polynucleotide"
aggagtaagaggagcaggctcctgcacagtgactacatgaacatgactccccgccgccccgggcccacccgcaagcattaccagccctatgccccaccacgcgacttcgcagcctatcgctcc

SEQ ID NO: 1091 - DNA, 336 bp, Artificial Sequence
  source: /note="Description of Artificial Sequence: Synthetic polynucleotide"
cgcgtgaaattcagccgcagcgcagatgctccagcctacaagcaggggcagaaccagctctacaacgaactcaatcttggtcggagagaggagtacgacgtgctggacaagcggagaggacgggacccagaaatgggcgggaagccgcgcagaaagaatccccaagagggcctgtacaacgagctccaaaaggataagatggcagaagcctatagcgagattggtatgaaaggggaacgcagaagaggcaaaggccacgacggactgtaccagggactcagcaccgccaccaaggacacctatgacgctcttcacatgcaggccctgccgcctcgg

SEQ ID NO: 1092 - DNA, 336 bp, Artificial Sequence
  source: /note="Description of Artificial Sequence: Synthetic polynucleotide"
agagtgaagttcagcaggagcgcagacgcccccgcgtaccagcagggccagaaccagctctataacgagctcaatctaggacgaagagaggagtacgatgttttggacaagagacgtggccgggaccctgagatggggggaaagccgagaaggaagaaccctcaggaaggcctgtacaatgaactgcagaaagataagatggcggaggcctacagtgagattgggatgaaaggcgagcgccggaggggcaaggggcacgatggcctttaccagggtctcagtacagccaccaaggacacctacgacgcccttcacatgcaggccctgccccctcgc

SEQ ID NO: 1093 - DNA, 105 bp, Artificial Sequence
  source: /note="Description of Artificial Sequence: Synthetic polynucleotide"
acaaaaaagaagtattcatccagtgtgcacgaccctaacggtgaatacatgttcatgagagcagtgaacacagccaaaaaatccagactcacagatgtgacccta

SEQ ID NO: 1094 - protein, 42 aa, Homo sapiens
KRGRKKLLYIFKQPFMRPVQTIQEEDGCSCRFPEEEEGGCEL

SEQ ID NO: 1095 - protein, 42 aa, Homo sapiens
KRGRKKLLYIFKQPFMRPVQTTQEEDGCSCRFPEEEEGGYEL

SEQ ID NO: 1096 - protein, 225 aa, Homo sapiens
TGTTTPAPRPPTPAPTIASQPLSLRPEACRPAAGGAVHTRGLDFACDIYIWAPLAGTCGVLLLSLVITLYCKRGRKKLLYIFKQPFMRPVQTTQEEDGCSCRFPEEEEGGCELRVKFSRSADAPAYQQGQNQLYNELNLGRREEYDVLDKRRGRDPEMGGKPRRKNPQEGLYNELQKDKMAEAYSEIGMKGERRRGKGHDGLYQGLSTATKDTYDALHMQALPPR

SEQ ID NO: 1097 - protein, 154 aa, Homo sapiens
KRGRKKLLYIFKQPFMRPVQTTQEEDGCSCRFPEEEEGGCELRVKFSRSADAPAYQQGQNQLYNELNLGRREEYDVLDKRRGRDPEMGGKPRRKNPQEGLYNELQKDKMAEAYSEIGMKGERRRGKGHDGLYQGLSTATKDTYDALHMQALPPR

SEQ ID NO: 1098 - protein, 194 aa, Homo sapiens
KRIKPIVWPSLPDHKKTLEHLCKKPRKNLNVSFNPESFLDCQIHRVDDIQARDEVEGFLQDTFPQQLEESEKQRLGGDVQSPNCPSEDVVITPESFGRDSSLTCLAGNVSACDAPILSSSRSLDCRESGKNGPHVYQDLLLSLGTTNSTLPPPFSLQSGILTLNPVAQGQPILTSLGSNQEEAYVTMSSFYQNQ

SEQ ID NO: 1099 - protein, 47 aa, Homo sapiens
RFSVVKRGRKKLLYIFKQPFMRPVQTTQEEDGCSCRFPEEEEGGCEL

SEQ ID NO: 1100 - protein, 341 aa, Homo sapiens
RKKRKDAKNNEVSFSQIKPKKSKLIRVENFEAYFKKQQADSNCGFAEEYEDLKLVGISQPKYAAELAENRGKNRYNNVLPYDISRVKLSVQTHSTDDYINANYMPGYHSKKDFIATQGPLPNTLKDFWRMVWEKNVYAIIMLTKCVEQGRTKCEEYWPSKQAQDYGDITVAMTSEIVLPEWTIRDFTVKNIQTSESHPLRQFHFTSWPDHGVPDTTDLLINFRYLVRDYMKQSPPESPILVHCSAGVGRTGTFIAIDRLIYQIENENTVDVYGIVYDLRMHRPLMVQTEDQYVFLNQCVLDIVRSQKDSKVDLIYQNTTAMTIYENLAPVTTFGKTNGYIA

SEQ ID NO: 1101 - protein, 48 aa, Homo sapiens
QRRKYRSNKGESPVEPAEPCHYSCPREEEGSTIPIQEDYRKPEPACSP

SEQ ID NO: 1102 - protein, 6 aa, Homo sapiens
FAAYRS

SEQ ID NO: 1103 - protein, 68 aa, Homo sapiens; identical to SEQ ID NO: 381

SEQ ID NO: 1104 - protein, 41 aa, Homo sapiens
RSKRSRLLHSDYMNMTPRRPGPTRKHYQPYAPPRDFAAYRS

SEQ ID NO: 1105 - protein, 40 aa, Homo sapiens
SKRSRLLHSDYMNMTPRRPGPTRKHYQPYAPPRDFAAYRS

SEQ ID NO: 1106 - protein, 106 aa, Homo sapiens
IEVMYPPPYLDNEKSNGTIIHVKGKHLCPSPLFPGPSKPFWVLVVVGGVLACYSLLVTVAFIIFWRSKRSRLLHSDYMNMTPRRPGPTRKHYQPYAPPRDFAAYRS

SEQ ID NO: 1107 - protein, 200 aa, Homo sapiens
RSKRSRLLHSDYMNMTPRRPGPTRKHYQPYAPPRDFAAYRSRFSVVKRGRKKLLYIFKQPFMRPVQTTQEEDGCSCRFPEEEEGGCELRVKFSRSADAPAYQQGQNQLYNELNLGRREEYDVLDKRRGRDPEMGGKPRRKNPQEGLYNELQKDKMAEAYSEIGMKGERRRGKGHDGLYQGLSTATKDTYDALHMQALPPR

SEQ ID NO: 1108 - protein, 188 aa, Homo sapiens
RSKRSRLLHSDYNMTPRRPGPTRKHYQPYAPPRDFAAYRSRDQRLPPDAHKPPGGGSFRTPIQEEQADAHSTLAKIRVKFSRSADAPAYQQGQNQLYNELNLGRREEYDVLDKRRGRDPEMGGKPRRKNPQEGLYNELQKDKMAEAYSEIGMKGERRRGKGHDGLYQGLSTATKDTYDALHMQALPPR

SEQ ID NO: 1109 - protein, 70 aa, Homo sapiens
MFWVLVVVGGVLACYSLLVTVAFIIFWVKRGRKKLLYIFKQPFMRPVQTTQEEDGCSCRFPEEEEGGCEL

SEQ ID NO: 1110 - protein, 108 aa, Homo sapiens
IEVMYPPPYLDNEKSNGTIIHVKGKHLCPSPLFPGPSKPFWVLVVVGGVLACYSLLVTVAFIIFWVKRGRKKLLYIFKQPFMRPVQTTQEEDGCSCRFPEEEEGGCEL

SEQ ID NO: 1111 - protein, 153 aa, Homo sapiens
RSKRSRLLHSDYMNMTPRRPGPTRKHYQPYAPPRDFAAYRSRVKFSRSADAPAYQQGQNQLYNELNLGRREEYDVLDKRRGRDPEMGGKPRRKNPQEGLYNELQKDKMAEAYSEIGMKGERRRGKGHDGLYQGLSTATKDTYDALHMQALPPR

SEQ ID NO: 1112 - protein, 151 aa, Homo sapiens
KRSRLLHSDYMNMTPRRPGPTRKHYQPYAPPRDFAAYRSRVKFSRSADAPAYQQGQNQLYNELNLGRREEYDVLDKRRGRDPEMGGKPRRKNPQEGLYNELQKDKMAEAYSEIGMKGERRRGKGHDGLYQGLSTATKDTYDALHMQALPPR

SEQ ID NO: 1113 - protein, 171 aa, Homo sapiens
MEHSTFLSGLVLATLLSQVSPFKIPIEELEDRVFVNCNTSITWVEGTVGTLLSDITRLDLGKRILDPRGIYRCNGTDIYKDKESTVQVHYRMCQSCVELDPATVAGIIVTDVIATLLLALGVFCFAGHETGRLSGAADTQALLRNDQVYQPLRDRDDAQYSHLGGNWARNK

SEQ ID NO: 1114 - protein, 127 aa, Homo sapiens
MEHSTFLSGLVLATLLSQVSPFKIPIEELEDRVFVNCNTSITWVEGTVGTLLSDITRLDLGKRILDPRGIYRCNGTDIYKDKESTVQVHYRTADTQALLRNDQVYQPLRDRDDAQYSHLGGNWARNK

SEQ ID NO: 1115 - protein, 21 aa, Homo sapiens
DQVYQPLRDRDDAQYSHLGGN

SEQ ID NO: 1116 - protein, 171 aa, Homo sapiens; identical to SEQ ID NO: 1113

SEQ ID NO: 1117 - protein, 127 aa, Homo sapiens; identical to SEQ ID NO: 1114

SEQ ID NO: 1118 - protein, 21 aa, Homo sapiens
DQVYQPLRDRDDAQYSHLGGN

SEQ ID NO: 1119 - protein, 207 aa, Homo sapiens
MQSGTHWRVLGLCLLSVGVWGQDGNEEMGGITQTPYKVSISGTTVILTCPQYPGSEILWQHNDKNIGGDEDDKNIGSDEDHLSLKEFSELEQSGYYVCYPRGSKPEDANFYLYLRARVCENCMEMDVMSVATIVIVDICITGGLLLLVYYWSKNRKAKAKPVTRGAGAGGRQRGQNKERPPPVPNPDYEPIRKGQRDLYSGLNQRRI

SEQ ID NO: 1120 - protein, 21 aa, Homo sapiens
NPDYEPIRKGQRDLYSGLNQR

SEQ ID NO: 1121 - protein, 182 aa, Homo sapiens
MEQGKGLAVLILAIILLQGTLAQSIKGNHLVKVYDYQEDGSVLLTCDAEAKNITWFKDGKMIGFLTEDKKKWNLGSNAKDPRGMYQCKGSQNKSKPLQVYYRMCQNCIELNAATISGFLFAEIVSIFVLAVGVYFIAGQDGVRQSRASDKQTLLPNDQLYQPLKDREDDQYSHLQGNQLRRN

SEQ ID NO: 1122 - protein, 21 aa, Homo sapiens
DQLYQPLKDREDDQYSHLQGN

SEQ ID NO: 1123 - protein, 21 aa, Homo sapiens
DQLYQPLKDREDDQYSHLQGN

SEQ ID NO: 1124 - protein, 182 aa, Homo sapiens; identical to SEQ ID NO: 1121

SEQ ID NO: 1125 - protein, 163 aa, Homo sapiens
MKWKALFTAAILQAQLPITEAQSFGLLDPKLCYLLDGILFIYGVILTALFLRVKFSRSADAPAYQQGQNQLYNELNLGRREEYDVLDKRRGRDPEMGGKPRRKNPQEGLYNELQKDKMAEAYSEIGMKGERRRGKGHDGLYQGLSTATKDTYDALHMQALPPR

SEQ ID NO: 1126 - protein, 164 aa, Homo sapiens
MKWKALFTAAILQAQLPITEAQSFGLLDPKLCYLLDGILFIYGVILTALFLRVKFSRSADAPAYQQGQNQLYNELNLGRREEYDVLDKRRGRDPEMGGKPQRRKNPQEGLYNELQKDKMAEAYSEIGMKGERRRGKGHDGLYQGLSTATKDTYDALHMQALPPR

SEQ ID NO: 1127 - protein, 164 aa, Homo sapiens; identical to SEQ ID NO: 1126

SEQ ID NO: 1128 - protein, 21 aa, Homo sapiens
NQLYNELNLGRREEYDVLDKR

SEQ ID NO: 1129 - protein, 112 aa, Homo sapiens
RVKFSRSADAPAYQQGQNQLYNELNLGRREEYDVLDKRRGRDPEMGGKPRRKNPQEGLYNELQKDKMAEAYSEIGMKGERRRGKGHDGLYQGLSTATKDTYDALHMQALPPR

SEQ ID NO: 1130 - protein, 21 aa, Homo sapiens
DGLYQGLSTATKDTYDALHMQ

SEQ ID NO: 1131 - protein, 112 aa, Homo sapiens
RVKFSRSAEPPAYQQGQNQLYNELNLGRREEYDVLDKRRGRDPEMGGKPRRKNPQEGLYNELQKDKMAEAYSEIGMKGERRRGKGHDGLYQGLSTATKDTYDALHMQALPPR

SEQ ID NO: 1132 - protein, 113 aa, Homo sapiens
RVKFSRSADAPAYQQGQNQLYNELNLGRREEYDVLDKRRGRDPEMGGKPQRRKNPQEGLYNELQKDKMAEAYSEIGMKGERRRGKGHDGLYQGLSTATKDTYDALHMQALPPR

SEQ ID NO: 1133 - protein, 114 aa, Homo sapiens
RSRVKFSRSADAPAYQQGQNQLYNELNLGRREEYDVLDKRRGRDPEMGGKPRRKNPQEGLYNELQKDKMAEAYSEIGMKGERRRGKGHDGLYQGLSTATKDTYDALHMQALPPR

SEQ ID NO: 1134 - protein, 98 aa, Homo sapiens
RVKFSRSADAPAYQQGEYDVLDKRRGRDPEMGGKPRRKNPQEGLYNELQKDKMAEAYSEIGMKGERRRGKGHDGLYQGLSTATKDTYDALHMQALPPR

SEQ ID NO: 1135 - protein, 112 aa, Homo sapiens
RVKFSRSADAPAYQQGQNQLYNELNLGRREEVDVLDKRRGRDPEMGGKPRRKNPQEGLYNELQKDKMAEAYSEIGMKGERRRGKGHDGLYQGLSTATKDTYDALHMQALPPR

SEQ ID NO: 1136 - protein, 173 aa, Homo sapiens
MIPAVVLLLLLLVEQAAALGEPQLCYILDAILFLVGIVLTLLVCRLKIQVRKAAITSYEKSRVKFSRSADAPAYQQGQNQLYNELNLGRREEYDVLDKRRGRDPEMGGKPRRKNPQEGLYNELQKDKMAEAVSEIGMKGERRRGKGHDGLYQGLSTATKDTYDALHMQALPPR

SEQ ID NO: 1137 - protein, 113 aa, Homo sapiens
LRVKFSRSADAPAYQQGQNQLYNELNLGRREEYDVLDKRRGRDPEMGGKPRRKNPQEGLYNELQKDKMAEAYSEIGMKGERRRGKGHDGLYQGLSTATKDTYDALHMQALPPR

SEQ ID NO: 1138 - protein, 60 aa, Homo sapiens
RVKFSRSADAPAYQQGQNQLYNELNLGRREEYDVLDKRRGRDPEMGGKPQRRKNPQEGLY

SEQ ID NO: 1139 - protein, 114 aa, Homo sapiens
LRVKFSRSADAPAYQQGQNQLYNELNLGRREEYDVLDKRRGRDPEMGGKPQRRKNPQEGLYNELQKDKMAEAYSEIGMKGERRRGKGHDGLYQGLSTATKDTYDALHMQALPPR

SEQ ID NO: 1140 - protein, 113 aa, Homo sapiens
RRVKFSRSADAPAYQQGQNQLYNELNLGRREEYDVLDKRRGRDPEMGGKPRRKNPQEGLYNELQKDKMAEAYSEIGMKGERRRGKGHDGLYQGLSTATKDTYDALHMQALPPR

SEQ ID NO: 1141 - protein, 21 aa, Homo sapiens
NQLYNELNLGRREEYDVLDKR

SEQ ID NO: 1142 - protein, 22 aa, Homo sapiens
EGLYNELQKDKMAEAYSEIGMK

SEQ ID NO: 1143 - protein, 21 aa, Homo sapiens
DGLYQGLSTATKDTYDALHMQ

SEQ ID NO: 1144 - protein, 112 aa, Homo sapiens; identical to SEQ ID NO: 1129

SEQ ID NO: 1145 - protein, 112 aa, Homo sapiens
RVKFSRSADAPAYKQGQNQLYNELNLGRREEYDVLDKRRGRDPEMGGKPRRKNPQEGLYNELQKDKMAEAYSEIGMKGERRRGKGHDGLYQGLSTATKDTYDALHMQALPPR

SEQ ID NO: 1146 - DNA, 338 bp, Artificial Sequence
  source: /note="Description of Artificial Sequence: Synthetic Construct"
agggtgaagttttctaggagcgccgatgcaccagcatataagcagggacagaaccagctgtacaacgagctgaatctgggcaggagagaggagtacgacgtgctggataagaggaggggaagggaccccgagatgggaggcaagccaaggagaaagaacccccaggagggcctgtataatgagctgcagaaggacaagatggccgaggcctactccgagatcggcatgaagggagagcggcgcaggggcaagggacacgatggcctgtatcagggcctgtctacagccaccaaggacacctacgatgcactgcacatgcaggccctgcctccaaggtg

SEQ ID NO: 1147 - DNA, 338 bp, Artificial Sequence
  source: /note="Description of Artificial Sequence: Synthetic Construct"
agggtgaagttttccaggtctgccgatgcccccgcctataagcagggccagaatcagctgtacaacgagctgaatctgggcaggagagaggagtacgacgtgctggataagaggaggggacgcgaccccgagatgggaggcaagcctaggagaaagaacccacaggagggcctgtataatgagctgcagaaggacaagatggccgaggcctactctgagatcggcatgaagggagagcggcgcaggggcaagggacacgatggcctgtatcagggcctgagcacagccaccaaggacacctacgatgcactgcacatgcaggccctgccacctaggtg

SEQ ID NO: 1148 - DNA, 338 bp, Artificial Sequence
  source: /note="Description of Artificial Sequence: Synthetic Construct"
agggtgaagtttagcaggtccgccgatgccccagcctataagcagggccagaaccagctgtacaacgagctgaatctgggcaggagggaagagtacgacgtgctggataagaggagaggaagggaccccgagatgggaggcaagccaaggaggaagaacccacaggagggcctgtataatgagctgcagaaggacaagatggccgaggcctacagcgagatcggcatgaagggagagaggagacggggcaagggacacgatggcctgtatcagggcctgtccacagccaccaaggacacctacgatgcactgcacatgcaggccctgcctccaaggtg

SEQ ID NO: 1149 - DNA, 338 bp, Artificial Sequence
  source: /note="Description of Artificial Sequence: Synthetic Construct"
agggtgaagttttccaggtctgccgatgccccagcctataagcagggccagaatcagctgtacaacgagctgaatctgggcaggagagaggagtacgacgtgctggataagaggaggggacgcgaccccgagatgggaggcaagcctaggagaaagaacccacaggagggcctgtataatgagctgcagaaggacaagatggccgaggcctactctgagatcggcatgaagggagagcggcgcaggggcaagggacacgatggcctgtatcagggcctgagcacagccaccaaggacacctacgatgcactgcacatgcaggccctgccacctaggtg

SEQ ID NO: 1150 - DNA, 338 bp, Artificial Sequence
  source: /note="Description of Artificial Sequence: Synthetic Construct"
agggtgaagtttagcaggtccgccgatgccccagcctataagcagggccagaaccagctgtacaacgagctgaatctgggcaggagggaagagtacgacgtgctggataagaggagaggaagggaccccgagatgggaggcaagccaaggaggaagaacccacaggagggcctgtataatgagctgcagaaggacaagatggccgaggcctactccgagatcggcatgaagggagagaggagacggggcaagggacacgatggcctgtatcagggcctgtctacagccaccaaggacacctacgatgcactgcacatgcaggccctgcctccaaggtg

SEQ ID NO: 1151 - DNA, 336 bp, Artificial Sequence
  source: /note="Description of Artificial Sequence: Synthetic polynucleotide"
agagtgaagttcagcaggagcgcagacgcccccgcgtacaagcagggccagaaccagctctataacgagctcaatctaggacgaagagaggagtacgatgttttggacaagagacgtggccgggaccctgagatggggggaaagccgagaaggaagaaccctcaggaaggcctgtacaatgaactgcagaaagataagatggcggaggcctacagtgagattgggatgaaaggcgagcgccggaggggcaaggggcacgatggcctttaccagggtctcagtacagccaccaaggacacctacgacgcccttcacatgcaggccctgccccctcgc

SEQ ID NO: 1152 - DNA, 336 bp, Artificial Sequence
  source: /note="Description of Artificial Sequence: Synthetic Construct"
agagtgaagttttccaggtctgccgatgccccagcctacaagcagggccagaatcagctgtataacgagctgaatctgggccggagagaggagtacgacgtgctggataagaggaggggacgggaccccgagatgggaggcaagccacggagaaagaacccccaggagggcctgtacaatgagctgcagaaggacaagatggccgaggcctattctgagatcggcatgaagggagagaggcgccggggcaagggacacgatggcctgtaccagggcctgagcacagccaccaaggacacctatgatgcactgcacatgcaggccctgcctccaagg

SEQ ID NO: 1153 - DNA, 336 bp, Artificial Sequence
  source: /note="Description of Artificial Sequence: Synthetic Construct"
agggtgaagttttctaggagcgccgatgcaccagcatataagcagggacagaaccagctgtacaacgagctgaatctgggcaggagagaggagtacgacgtgctggataagaggaggggaagggaccccgagatgggaggcaagccaaggagaaagaacccccaggagggcctgtataatgagctgcagaaggacaagatggccgaggcctactccgagatcggcatgaagggagagcggcgcaggggcaagggacacgatggcctgtatcagggcctgtctacagccaccaaggacacctacgatgcactgcacatgcaggccctgcctccaagg

SEQ ID NO: 1154 - DNA, 336 bp, Artificial Sequence
  source: /note="Description of Artificial Sequence: Synthetic Construct"
agggtgaagttttccaggtctgccgatgcccccgcctataagcagggccagaatcagctgtacaacgagctgaatctgggcaggagagaggagtacgacgtgctggataagaggaggggacgcgaccccgagatgggaggcaagcctaggagaaagaacccacaggagggcctgtataatgagctgcagaaggacaagatggccgaggcctactctgagatcggcatgaagggagagcggcgcaggggcaagggacacgatggcctgtatcagggcctgagcacagccaccaaggacacctacgatgcactgcacatgcaggccctgccacctagg

SEQ ID NO: 1155 - DNA, 336 bp, Artificial Sequence
  source: /note="Description of Artificial Sequence: Synthetic Construct"
agggtgaagtttagcaggtccgccgatgccccagcctataagcagggccagaaccagctgtacaacgagctgaatctgggcaggagggaagagtacgacgtgctggataagaggagaggaagggaccccgagatgggaggcaagccaaggaggaagaacccacaggagggcctgtataatgagctgcagaaggacaagatggccgaggcctacagcgagatcggcatgaagggagagaggagacggggcaagggacacgatggcctgtatcagggcctgtccacagccaccaaggacacctacgatgcactgcacatgcaggccctgcctccaagg

SEQ ID NO: 1156 - DNA, 336 bp, Artificial Sequence
  source: /note="Description of Artificial Sequence: Synthetic Construct"
agggtgaagttttccaggtctgccgatgccccagcctataagcagggccagaatcagctgtacaacgagctgaatctgggcaggagagaggagtacgacgtgctggataagaggaggggacgcgaccccgagatgggaggcaagcctaggagaaagaacccacaggagggcctgtataatgagctgcagaaggacaagatggccgaggcctactctgagatcggcatgaagggagagcggcgcaggggcaagggacacgatggcctgtatcagggcctgagcacagccaccaaggacacctacgatgcactgcacatgcaggccctgccacctagg

SEQ ID NO: 1157 - DNA, 336 bp, Artificial Sequence
  source: /note="Description of Artificial Sequence: Synthetic Construct"
agggtgaagtttagcaggtccgccgatgccccagcctataagcagggccagaaccagctgtacaacgagctgaatctgggcaggagggaagagtacgacgtgctggataagaggagaggaagggaccccgagatgggaggcaagccaaggaggaagaacccacaggagggcctgtataatgagctgcagaaggacaagatggccgaggcctactccgagatcggcatgaagggagagaggagacggggcaagggacacgatggcctgtatcagggcctgtctacagccaccaaggacacctacgatgcactgcacatgcaggccctgcctccaagg

SEQ ID NO: 1158 - protein, 110 aa, Homo sapiens
RVKFSRSADAPAYQQGQNQLYNELNLGRREEYDVLDKRRGRDPEMGGKPRRKNPQEGLYNELQKDKMAEAYSEIGMKGERRRGKGHDGLYQGLSTATKDTYDALHMQALP

SEQ ID NO: 1159 - protein, 137 aa, Homo sapiens
DPKLCYLLDGILFIYGVILTALFLRVKFSRSADAPAYQQGQNQLYNELNLGRREEYDVLDKRRGRDPEMGGKPQRRKNPQEGLYNELQKDKMAEAYSEIGMKGERRRGKGHDGLYQGLSTATKDTYDALHMQALPPR

SEQ ID NO: 1160 - protein, 163 aa, Homo sapiens; identical to SEQ ID NO: 1125

SEQ ID NO: 1161 - protein, 38 aa, Homo sapiens
RSRDQRLPPDAHKPPGGGSFRTPIQEEQADAHSTLAKI

SEQ ID NO: 1162 - protein, 226 aa, Homo sapiens
MPGGPGVLQALPATIFLLFLLSAVYLGPGCQALWMHKVPASLMVSLGEDAHFQCPHNSSNNANVTWWRVLHGNYTWPPEFLGPGEDPNGTLIIQNVNKSHGGIYVCRVQEGNESYQQSCGTYLRVRQPPPRPFLDMGEGTKNRIITAEGIILLFCAVVPGTLLLFRKRWQNEKLGLDAGDEYEDENLYEGLNLDDCSMYEDISRGLQGTYQDVGSLNIGDVQLEKP

SEQ ID NO: 1163 - protein, 188 aa, Homo sapiens
MPGGPGVLQALPATIFLLFLLSAVYLGPGCQALWMHKVPASLMVSLGEDAHFQCPHNSSNNANVTWWRVLHGNYTWPPEFLGPGEDPNEPPPRPFLDMGEGTKNRIITAEGIILLFCAVVPGTLLLFRKRWQNEKLGLDAGDEYEDENLYEGLNLDDCSMYEDISRGLQGTYQDVGSLNIGDVQLEKP

SEQ ID NO: 1164 - protein, 226 aa, Homo sapiens; identical to SEQ ID NO: 1162

SEQ ID NO: 1165 - protein, 21 aa, Homo sapiens
ENLYEGLNLDDCSMYEDISRG

SEQ ID NO: 1166 - protein, 84 aa, Homo sapiens
FVPVFLPAKPTTTPAPRPPTPAPTIASQPLSLRPEACRPAAGGAVHTRGLDFACDIYIWAPLAGTCGVLLLSLVITLYCNHRNR

SEQ ID NO: 1167 - protein, 84 aa, Homo sapiens
FVPVFLPAKPITTPAPRPPTPAPTIASQPLSLRPEACRPAAGGAVHTRGLDFACDIYIWAPLAGTCGVLLLSLVITLYCNHRNR

SEQ ID NO: 1168 - protein, 47 aa, Homo sapiens
PTTTPAPRPPTPAPTIASQPLSLRPEACRPAAGGAVHTRGLDFACDI

SEQ ID NO: 1169 - protein, 41 aa, Homo sapiens
AVSLSKMLKKRSPLTTGVFVKMAPTEAECEKQFQPYFIPIN

SEQ ID NO: 1170 - protein, 47 aa, Homo sapiens
AVSLSKMLKKRSPLTTGVYMNMTPRRPECEKQFQPYAPPRDFAAYRS

SEQ ID NO: 1171 - protein, 20 aa, Homo sapiens
RPRRSPAQDGKVYINMPGRG

SEQ ID NO: 1172 - protein, 113 aa, Homo sapiens
MGGLEPCSRLLLLPLLLAVSGLRPVQAQAQSDCSCSTVSPGVLAGIVMGDLVLTVLIALAVYFLGRLVPRGRGAAEAATRKQRITETESPYQELQGQRSDVYSDLNTQRPYYK

SEQ ID NO: 1173 - protein, 112 aa, Homo sapiens
MGGLEPCSRLLLLPLLLAVSGLRPVQAQAQSDCSCSTVSPGVLAGIVMGDLVLTVLIALAVYFLGRLVPRGRGAAEATRKQRITETESPYQELQGQRSDVYSDLNTQRPYYK

SEQ ID NO: 1174 - protein, 102 aa, Homo sapiens
MGGLEPCSRLLLLPLLLAVSDCSCSTVSPGVLAGIVMGDLVLTVLIALAVYFLGRLVPRGRGAAEAATRKQRITETESPYQELQGQRSDVYSDLNTQRPYYK

SEQ ID NO: 1175 - protein, 101 aa, Homo sapiens
MGGLEPCSRLLLLPLLLAVSDCSCSTVSPGVLAGIVMGDLVLTVLIALAVYFLGRLVPRGRGAAEATRKQRITETESPYQELQGQRSDVYSDLNTQRPYYK

SEQ ID NO: 1176 - protein, 113 aa, Homo sapiens; identical to SEQ ID NO: 1172

SEQ ID NO: 1177 - protein, 112 aa, Homo sapiens; identical to SEQ ID NO: 1173

SEQ ID NO: 1178 - protein, 102 aa, Homo sapiens; identical to SEQ ID NO: 1174

SEQ ID NO: 1179 - protein, 101 aa, Homo sapiens; identical to SEQ ID NO: 1175

SEQ ID NO: 1180 - protein, 21 aa, Homo sapiens
ESPYQELQGQRSDVYSDLNTQ

SEQ ID NO: 1181 - protein, 21 aa, Homo sapiens
ESPYQELQGQRSDVYSDLNTQ

SEQ ID NO: 1182 - protein, 49 aa, Homo sapiens
RSQCMWPRETQLLLEVPPSTEDARSCQFPEEERGERSAEEKGRLGDLWV

SEQ ID NO: 1183 - protein, 35 aa, Homo sapiens
TKKKYSSSVHDPNGEFMFMRAVNTAKKSRLTDVTL

SEQ ID NO: 1184 - protein, 39 aa, Homo sapiens
KSRQTPPLASVEMEAMEALPVTWGTSSRDEDLENCSHHL

SEQ ID NO: 1185 - protein, 149 aa, Homo sapiens
RRDQRLPPDAHKPPGGGSFRTPIQEEQADAHSTLAKIRVKFSRSADAPAYQQGQNQLYNELNLGRREEYDVLDKRRGRDPEMGGKPRRKNPQEGLYNELQKDKMAEAYSEIGMKGERRRGKGHDGLYQGLSTATKDTYDALHMQALPPR

SEQ ID NO: 1186 - protein, 69 aa, Artificial Sequence
  source: /note="Description of Artificial Sequence: Synthetic polypeptide"
TTTPAPRPPTPAPTIASQPLSLRPEACRPAAGGAVHTRGLDFACDFWLPIGCAAFVVVCILGCILICWL

SEQ ID NO: 1187 - DNA, 207 bp, Artificial Sequence
  source: /note="Description of Artificial Sequence: Synthetic polynucleotide"
accacgacgccagcgccgcgaccaccaacaccggcgcccaccatcgcgtcgcagcccctgtccctgcgcccagaggcgtgccggccagcggcggggggcgcagtgcacacgagggggctggacttcgcctgtgatttctggttacccataggatgtgcagcctttgttgtagtctgcattttgggatgcatacttatttgttggctt

SEQ ID NO: 1188 - protein, 46 aa, Homo sapiens
TTTPAPRPPTPAPTIASQPLSLRPEACRPAAGGAVHTRGLDFACDI

SEQ ID NO: 1189 - protein, 21 aa, Homo sapiens
FLVIIVILSALFLGTLACFCV

SEQ ID NO: 1190 - protein, 31 aa, Homo sapiens
IISFFLALTSTALLFLLFFLTLRFSVVKRGR

SEQ ID NO: 1191 - protein, 27 aa, Homo sapiens
IISFFLALTSTALLFLLFFLTLRFSVV

SEQ ID NO: 1192 - protein, 26 aa, Homo sapiens
VAAILGLGLVLGLLGPLAILLALYLL

SEQ ID NO: 1193 - protein, 363 aa, Homo sapiens
AVFGCIFGALVIVTVGGFIFWRKKRKDAKNNEVSFSQIKPKKSKLIRVENFEAYFKKQQADSNCGFAEEYEDLKLVGISQPKYAAELAENRGKNRYNNVLPYDISRVKLSVQTHSTDDYINANYMPGYHSKKDFIATQGPLPNTLKDFWRMVWEKNVYAIIMLTKCVEQGRTKCEEYWPSKQAQDYGDITVAMTSEIVLPEVVTIRDFTVKNIQTSESHPLRQFHFTSWPDHGVPDTTDLLINFRYLVRDYMKQSPPESPILVHCSAGVGRTGTFIAIDRLIYQIENENTVDVYGIVYDLRMHRPLMVQTEDQYVFLNQCVLDIVRSQKDSKVDLIYQNTTAMTIYENLAPVTTFGKTNGYIA

SEQ ID NO: 1194 - protein, 21 aa, Homo sapiens
AVFGCIFGALVIVTVGGFIFW

SEQ ID NO: 1195 - protein, 185 aa, Homo sapiens
KEITNALETWGALGQDINLDIPSFQMSDDIDDIKWEKTSDKKKIAQFRKEKETFKEKDTYKLFKNGTLKIKHLKTDDQDIYKVSIYDTKGKNVLEKIFDLKIQERVSKPKISWTCINTTLTCEVMNGTDPELNLYQDGKHLKLSQRVITHKWTTSLSAKFKCTAGNKVSKESSVEPVSCPEKGLD

SEQ ID NO: 1196 - protein, 106 aa, Homo sapiens
IEVMYPPPYLDNEKSNGTITHVKGKHLCPSPLFPGPSKPFWVLVVVGGVLACYSLLVTVAHIFWVRSKRSRLLHSDYMNMTPRRPGPTRKHYQPYAPPRDFAAYRS

SEQ ID NO: 1197 - protein, 66 aa, Homo sapiens
IEVMYPPPYLDNEKSNGTIIHVKGKHLCPSPLFPGPSKPFWVLVVVGGVLACYSLLVTVAFIIFWV

SEQ ID NO: 1198 - protein, 33 aa, Homo sapiens
IFWVLVVVGGVLACYSLLVTVAFIIFWVRSKRR

SEQ ID NO: 1199 - protein, 68 aa, Homo sapiens; identical to SEQ ID NO: 381

SEQ ID NO: 1200 - protein, 28 aa, Homo sapiens
MFWVLVVVGGVLACYSLLVTVAFIIFWV

SEQ ID NO: 1201 - protein, 26 aa, Homo sapiens
FWVLVVVGGVLACYSLLVTVAFHFWV

SEQ ID NO: 1202 - protein, 68 aa, Homo sapiens
FWVLVVVGGVLACYSLLVTVAFIIFWVRSKRSRLLHSDYMNMTPRRPGPTRKHYQAYAAARDFAAYRS

SEQ ID NO: 1203 - protein, 106 aa, Homo sapiens
IEVMYPPPYLDNEKSNGTIIHVKGKHLCPSPLFPGPSKPFWVLWVGGVLACYSLLVTVAFIIFWVRSKRSRLLHSDYMNMTPRRPGPTRKHYQPYAPPRDFAAYRS

SEQ ID NO: 1204 - protein, 28 aa, Homo sapiens
MFWVLVVVGGVLACYSGGVTVAFIIFWV

SEQ ID NO: 1205 - protein, 26 aa, Homo sapiens
WVLVVVGGVLACYSLLVTVAFIIFWV

SEQ ID NO: 1206 - protein, 28 aa, Homo sapiens
FWVLVVVGGVLACYSLLVTVAFIIFWVR

SEQ ID NO: 1207 - protein, 69 aa, Homo sapiens
PFWVLVVVGGVLACYSLLVTVAFIIFWVRSKRSRLLHSDYMNMTPRRPGPTRKHYQPYAPPRDFAAYRS

SEQ ID NO: 1208 - protein, 180 aa, Homo sapiens
FWVLVVVGGVLACYSLLVTVAFIIFWVRSKRSRLLHSDYMNMTPRRPGPTRKHYQPYAPPRDFAAYRSRVKFSRSADAPAYQQGQNQLYNELNLGRREEYDVLDKRRGRDPEMGGKPRRKNPQEGLYNELQKDKMAEAYSEIGMKGERRRGKGHDGLYQGLSTATKDTYDALHMQALPPR

SEQ ID NO: 1209 - protein, 216 aa, Homo sapiens
FWVLVVVGGVLACYSLLVTVAFIIFWVRSKRSRLLHSDYMNMTPRRPGPTRKHYQPYAPPRDFAAYRSRDQRLPPDAHKPPGGGSFRTPIQEEQADAHSTLAKIRVKFSRSADAPAYQQGQNQLYNELNLGRREEYDVLDKRRGRDPEMGGKPRRKNPQEGLYNELQKDKMAEAYSEIGMKGERRRGKGHDGLYQGLSTATKDTYDALHMQALPPR

SEQ ID NO: 1210 - protein, 140 aa, Homo sapiens
FWVLVVVGGVLACYSLLVTVAFIIFWVRRVKFSRSADAPAYQQGQNQLYNELNLGRREEYDVLDKRRGRDPEMGGKPRRKNPQEGLYNELQKDKMAEAYSEIGMKGERRRGKGHDGLYQGLSTATKDTYDALHMQALPPR

SEQ ID NO: 1211 - protein, 23 aa, Homo sapiens
LCYLLDGILFIYGVILTALFLRV

SEQ ID NO: 1212 - protein, 51 aa, Homo sapiens
MKWKALFTAAILQAQLPITEAQSFGLLDPKLCYLLDGILFIYGVILTALFL

SEQ ID NO: 1213 - protein, 21 aa, Homo sapiens
LCYLLDGILFIYGVILTALFL

SEQ ID NO: 1214 - protein, 25 aa, Homo sapiens
ALIVLGGVAGLLLFIGLGIFFCVRC

SEQ ID NO: 1215 - protein, 22 aa, Homo sapiens
MALIVLGGVAGLLLFIGLGIFF

SEQ ID NO: 1216 - protein, 725 aa, Homo sapiens
ALIAFLAFLIIVTSIALLVVLYKIYDLHKKRSCNLDEQQELVERDDEKQLMNVEPIHADILLETYKRKIADEGRLFLAEFQSIPRVFSKFPIKEARKPFNQNKNRYVDILPYDYNRVELSEINGDAGSNYINASYIDGFKEPRKYIAAQGPRDETVDDFWRMIWEQKATVIVMVTRCEEGNRNKCAEYWPSMEEGTRAFGDVVVKINQHKRCPDYIIQKLNIVNKKEKATGREVTHIQFTSWPDHGVPEDPHLLLKLRRRVNAFSNFFSGPIWHCSAGVGRTGTYIGIDAMLEGLEAENKVDVYGYVVKLRRQRCLMVQVEAQYILIHQALVEYNQFGETEVNLSELHPYLHNMKKRDPPSEPSPLEAEFQRLPSYRSWRTQHIGNQEENKSKNRNSNVIPYDYNRVPLKHELEMSKESEHDSDESSDDDSDSEEPSKYINASFIMSYWKPEVMIAAQGPLKETIGDFWQMIFQRKVKVIVMLTELKHGDQEICAQYWGEGKQTYGDIEVDLKDTDKSSTYTLRVFELRHSKRKDSRTVYQYQYTNWSVEQLPAEPKELISMIQWKQKLPQKNSSEGNKHHKSTPLLIHCRDGSQQTGIFCALLNLLESAETEEWDIFQWKALRKARPGMVSTFEQYQFLYDVIASTYPAQNGQVKKNNHQEDKIEFDNEVDKVKQDANCVNPLGAPEKLPEAKEQAEGSEPTSGTEGPEHSVNGPASPALNQGS

SEQ ID NO: 1217 - protein, 23 aa, Homo sapiens
PLFIPVAVMVTAFSGLAFIIWLA

SEQ ID NO: 1218 - protein, 24 aa, Homo sapiens
ALPAALAVISFLLGLGLGVACVLA

SEQ ID NO: 1219 - protein, 21 aa, Homo sapiens
MALPVTALLLPLALLLHAARP

SEQ ID NO: 1220 - protein, 286 aa, Homo sapiens
AAAFVPVFLPAKPTTTPAPRPPTPAPTIASQPLSLRPEACRPAAGGAVHTRGLDFACDIYIWAPLAGTCGVLLLSLVITLYCNHRNRSKRSRLLHSDYMNMTPRRPGPTRKHYQPYAPPRDFAAYRSRFSVVKRGRKKLLYIFKQPFMRPVQTTQEEDGCSCRFPEEEEGGCELRVKFSRSADAPAYQQGQNQLYNELNLGRREEYDVLDKRRGRDPEMGGKPRRKNPQEGLYNELQKDKMAEAYSEIGMKGERRRGKGHDGLYQGLSTATKDTYDALHMQALPPR

SEQ ID NO: 1221 - protein, 226 aa, Homo sapiens
AAATTTPAPRPPTPAPTIASQPLSLRPEACRPAAGGAVHTRGLDFACDIYIWAPLAGTCGVLLLSLVITLYCKRGRKKLLYIFKQPFMRPVQTTQEEDGCSCRFPEEEEGGCELRVKFSRSADAPAYKQGQNQLYNELNLGRREEYDVLDKRRGRDPEMGGKPRRKNPQEGLYNELQKDKMAEAYSEIGMKGERRRGKGHDGLYQGLSTATKDTYDALHMQALPPR

SEQ ID NO: 1222 - protein, 83 aa, Homo sapiens
FVPVFLPAKPTTTPAPRPPTPAPTIASQPLSLRPEACRPAAGGAVHTRGLDFACDIYIWAPLAGTCGVLLLSLVITLYCNHRN

SEQ ID NO: 1223 - protein, 22 aa, Homo sapiens
IWAPLAGTCGVLLLSLVITLYC

SEQ ID NO: 1224 - protein, 24 aa, Homo sapiens
IYIWAPLAGTCGVLLLSLVITLYC

SEQ ID NO: 1225 - DNA, 72 bp, Artificial Sequence
  source: /note="Description of Artificial Sequence: Synthetic Construct"
atctatatctgggcaccactggcaggaacatgtggcgtgctgctgctgtccctggtcatcaccctgtattgc

SEQ ID NO: 1226 - DNA, 72 bp, Artificial Sequence
  source: /note="Description of Artificial Sequence: Synthetic Construct"
atctacatctgggcaccactggcaggaacatgcggcgtgctgctgctgtccctggtcatcaccctgtattgt

SEQ ID NO: 1227 - DNA, 72 bp, Artificial Sequence
  source: /note="Description of Artificial Sequence: Synthetic Construct"
atctacatctgggcacctctggcaggaacatgcggcgtgctgctgctgtctctggtcatcaccctgtattgt

SEQ ID NO: 1228 - DNA, 72 bp, Artificial Sequence
  source: /note="Description of Artificial Sequence: Synthetic oligonucleotide"
atctacatctgggcgcccttggccgggacttgtggggtccttctcctgtcactggttatcaccctttactgc

SEQ ID NO: 1229 - DNA, 72 bp, Artificial Sequence
  source: /note="Description of Artificial Sequence: Synthetic oligonucleotide"
atctacatttgggcccctctggctggtacttgcggggtcctgctgctttcactcgtgatcactctttactgt

SEQ ID NO: 1230 - protein, 25 aa, Homo sapiens
IYIWAPLAGTCGVLLLSLVITLYCR

SEQ ID NO: 1231 - protein, 71 aa, Homo sapiens
PTTTPAPRPPTPAPTIASQPLSLRPEACRPAAGGAVHTRGLDFACDIYIWAPLAGTCGVLLLSLVITLYCN

SEQ ID NO: 1232 - protein, 25 aa, Homo sapiens
IYIWAPLAGTCGVLLLSLVITLVCR

SEQ ID NO: 1233 - protein, 21 aa, Homo sapiens
IYIWAPLAGTCGVLLLSLVIT

SEQ ID NO: 1234 - protein, 23 aa, Homo sapiens
IYIWAPLAGTCGVLLLSLVITLY

SEQ ID NO: 1235 - protein, 23 aa, Homo sapiens
LGLLVAGVLVLLVSLGVAIHLCC

SEQ ID NO: 1236 - protein, 73 aa, Homo sapiens
TPAPRPPTPAPTIASQPLSLRPEACRPAAGGAWTRGLDFACDIYIWAPLAGTCGVLLLSLVITLYCNHRNRRR

SEQ ID NO: 1237 - protein, 27 aa, Homo sapiens
ILLAGLVAADAVASLLIVGAVFLCARR

SEQ ID NO: 1238 - protein, 52 aa, Homo sapiens
FFIPLLVVILFAVDTGLFISTQQQVTFLLKIKRTRKGFRLLNPHPKPNPKNN

SEQ ID NO: 1239 - protein, 257 aa, Homo sapiens
MAPAMESPTLLCVALLFFAPDGVLAVPQKPKVSLNPPWNRIFKGENVTLTCNGNNFFEVSSTKWFHNGSLSEETNSSLNIVNAKFEDSGEYKCQHQQVNESEPVYLEVFSDWLLLQASAEVVMEGQPLFLRCHGWRNWDVYKVIYYKDGEALKYWYENHNISITNATVEDSGTYYCTGKVWQLDYESEPLNITVIKAPREKYWLQFFIPLLVVILFAVDTGLFISTQQQVTFLLKIKRTRKGFRLLNPHPKPNPKNN

SEQ ID NO: 1240 - protein, 54 aa, Homo sapiens
DIFIPLLVVILFAVDTGLFISTQQQVTFLLKIKRTRKGFRLLNPHPKPNPKNNR

SEQ ID NO: 1241 - protein, 31 aa, Homo sapiens
PLGWLTVVLLAVAACVLLLTSAQLGLHIWQL

SEQ ID NO: 1242 - protein, 24 aa, Homo sapiens
SIISAVVGILLVVVLGVVFGILII

SEQ ID NO: 1243 - protein, 113 aa, Homo sapiens
CHPECQPQNGSVTCFGPEADQCVACAHYKDPPFCVARCPSGVKPDLSYMPIWKFPDEEGACQPCPINCTHSCVDLDDKGCPAEQRASPLTSIISAVVGILLVVVLGVVFGILI

SEQ ID NO: 1244 - protein, 21 aa, Homo sapiens
FWLPIGCAAFVVVCILGCILI

SEQ ID NO: 1245 - protein, 233 aa, Homo sapiens
EPKSPDKTHTCPPCPAPPVAGPSVFLFPPKPKDTLMIARTPEVTCVVVDVSHEDPEVKFNWYVDGVEVHNAKTKPREEQYNSTYRVVSVLTVLHQDWLNGKEYKCKVSNKALPAPIEKTISKAKGQPREPQVYTLPPSRDELTKNQVSLTCLVKGFYPSDIAVEWESNGQPENNYKTTPPVLDSDGSFFLYSKLTVDKSRWQQGNVFSCSVMHEALHNHYTQKSLSLSPGKKD

SEQ ID NO: 1246 - protein, 21 aa, Homo sapiens
VAAILGLGLVLGLLGPLAILL

SEQ ID NO: 1247 - protein, 244 aa, Homo sapiens
MDTESNRRANLALPQEPSSVPAFEVLEISPQEVSSGRLLKSASSPPLHTWLTVLKKEQEFLGVTQILTAMICLCFGTVVCSVLDISHIEGDIFSSFKAGYPFWGAIFFSISGMLSIISERRNATYLVRGSLGANTASSIAGGTGITILIINLKKSLAYIHIHSCQKFFETKCFMASFSTEIVVMMLFLTILGLGSAVSLTICGAGEELKGNKVPEDRVYEELNIYSATYSELEDPGEMSPPIDL

SEQ ID NO: 1248 - protein, 21 aa, Homo sapiens
LLFLILGVLSLLLLVTGAFGF

SEQ ID NO: 1249 - protein, 20 aa, Homo sapiens
VGWGGLLGSLVLLVWVLAVI

SEQ ID NO: 1250 - protein, 27 aa, Homo sapiens
FWALVVVAGVLFCYGLLVTVALCVIWT

SEQ ID NO: 1251 - protein, 107 aa, Homo sapiens
IEVMYPPPYLDNEKSNGTIIHVKGKHLCPSPLFPGPSKPFWVLVVVGGVLACYSLLVTVAFIIFWVRSKRSRLLHSDYMNMTPRRPGPTRKHYQPYAPPRDFAAYRS

SEQ ID NO: 1252 - protein, 65 aa, Homo sapiens
VMYPPPYLDNEKSNGTIIHVKGKHLCPSPLFPGPSKPFWVLVVVGGVLACYSLLVTVAFIIFWVR

SEQ ID NO: 1253 - protein, 101 aa, Homo sapiens
APVGLVARLADESGHVVLRWLPPPETPMTSHIRYEVDVSAGNGAGSVQRVEILEGRTECVLSNLRGRTRYTFAVRARMAEPSFGGFWSAWSEPVSLLTPSD

SEQ ID NO: 1254 - protein, 68 aa, Homo sapiens
TTPAPRPPTPAPTIASQPLSLRPEACRPAAGGAVHTRGLDFACDIYIWAPLAGTCGVLLLSLVITLYC

SEQ ID NO: 1255 - protein, 243 aa, Homo sapiens
DIQMTQSSSYLSVSLGGRVTITCKASDHINNWLAWYQQKPGNAPRLLISGATSLETGVPSRFSGSGSGKDYTLSITSLQTEDVATYYCQQYWSTPFTFGSGTKLEIKGGGGSGGGGSGGGGSQVQLKESGPGLVAPSQSLSITSTVSGFSLSRYSVHWVRQPPGKGLEWLGMIWGGGSTDYNSALKSRLSISKDNSKSQVFLKMNSLQTDDTAMYYCARNEGDTTAGTWFAYWGQGTLVTVSS

SEQ ID NO: 1256 - protein, 62 aa, Homo sapiens
ALSNSIMYFSHFVPVFLPAKPTTTPAPRPPTPAPTIASQPLSLRPEACRPAAGGAVHTRGLD

SEQ ID NO: 1257 - protein, 68 aa, Homo sapiens
TTTPAPRPPTPAPTIASQPLSLRPEACRPAAGGAVHTRGLDFACDIYIWAPLAGTCGVLLLSLVITLY

SEQ ID NO: 1258 - protein, 70 aa, Homo sapiens
KPTTTPAPRPPTPAPTIASQPLSLRPEACRPAAGGAVHTRGLDFACDIYIWAPLAGTCGVLLLSLVITLY

SEQ ID NO: 1259 - protein, 42 aa, Homo sapiens
KRGRKKLLYIFKQPFMRPVQTTQEEDGCSCRFPEEEEGGCEL

SEQ ID NO: 1260 - DNA, 126 bp, Artificial Sequence
  source: /note="Description of Artificial Sequence: Synthetic Domain"
aagagaggccggaagaagctgctgtacatcttcaagcagcccttcatgaggcccgtgcagacaacccaggaggaggacggctgcagctgtcggttcccagaggaggaggagggaggatgtgagctg

SEQ ID NO: 1261 - DNA, 126 bp, Artificial Sequence
  source: /note="Description of Artificial Sequence: Synthetic Domain"
aagcgcggcaggaagaagctgctgtacatcttcaagcagccctttatgcgccctgtgcagacaacccaggaggaggacggctgcagctgtaggttcccagaggaggaggagggaggatgtgagctg

SEQ ID NO: 1262 - DNA, 126 bp, Artificial Sequence
  source: /note="Description of Artificial Sequence: Synthetic Domain"
aagcgcggcaggaagaagctgctgtacatcttcaagcagccttttatgcgcccagtgcagacaacccaggaggaggacggctgcagctgtaggttccctgaggaggaggagggaggatgtgagctg

SEQ ID NO: 1263 - DNA, 126 bp, Artificial Sequence
  source: /note="Description of Artificial Sequence: Synthetic Domain"
aagcgcggcaggaagaagctgctgtacatcttcaagcagccctttatgcgccctgtgcagacaacccaggaggaggacggctgcagctgtaggttccctgaggaggaggagggaggatgtgagctg

SEQ ID NO: 1264 - DNA, 126 bp, Artificial Sequence
  source: /note="Description of Artificial Sequence: Synthetic Domain"
aagcgcggcaggaagaagctgctgtacatcttcaagcagccttttatgcgcccagtgcagacaacccaggaggaggacggctgcagctgtaggttccctgaggaggaggagggaggatgcgagctg

SEQ ID NO: 1265 - DNA, 126 bp, Artificial Sequence
  source: /note="Description of Artificial Sequence: Synthetic Domain"
aagcgcggccggaagaagctgctgtatatcttcaagcagcccttcatgcggcccgtgcagacaacccaggaggaggacggctgcagctgtaggttccctgaggaggaggagggcggctgtgagctg

SEQ ID NO: 1266 - DNA, 126 bp, Artificial Sequence
  source: /note="Description of Artificial Sequence: Synthetic polynucleotide"
aaacggggcagaaagaaactcctgtatatattcaaacaaccatttatgagaccagtacaaactactcaagaggaagatggctgtagctgccgatttccagaagaagaagaaggaggatgtgaactg

SEQ ID NO: 1267 - DNA, 126 bp, Artificial Sequence
  source: /note="Description of Artificial Sequence: Synthetic polynucleotide"
aagcgcggtcggaagaagctgctgtacatctttaagcaacccttcatgaggcctgtgcagactactcaagaggaggacggctgttcatgccggttcccagaggaggaggaaggcggctgcgaactg

SEQ ID NO: 1268 - protein, 35 aa, Homo sapiens
TKKKYSSSVHDPNGEYMFMRAVNTAKKSRLTDVTL

SEQ ID NO: 1269 - protein, 27 aa, Homo sapiens
FWVLVVVGGVLACYSLLVTVAFIIFWV

SEQ ID NO: 1270 - protein, 86 aa, Homo sapiens
MIPAVVLLLLLLVEQAAALGEPQLCYILDAILFLYGIVLTLLYCRLKIQVRKAAITSYEKSDGVYTGLSTRNQETYETLKHEKPPQ

SEQ ID NO: 1271 - protein, 222 aa, Homo sapiens
AAAIEVMYPPPYLDNEKSNGTIIHVKGKHLCPSPLFPGPSKPFWVLVVVGGVLACYSLLVTVAFIIFWVRSKRSRLLHSDYMNMTPRRPGPTRKHYQPYAPPRDFAAYRSRVKFSRSADAPAYQQGQNQLYNELNLGRREEYDVLDKRRGRDPEMGGKPRRKNPQEGLYNELQKDKMAEAYSEIGMKGERRRGKGHDGLYQGLSTATKDTYDALHMQALPPR

SEQ ID NO: 1272 - protein, 705 aa, Artificial Sequence
  source: /note="Description of Artificial Sequence: Synthetic Chimeric Antigen Receptor sequence"
ADAPAYQQGQNQLYNELNLGRREEYDVLDKRRGRDPEMGGKPRRKNPQEGLYNELQKDKMAEAYSEIGMKGERRRGKGHDGLYQGLSTATKDTYDALHMQALPPRRAEGRGSLLTCGDVEENPGPMAVPTQVLGLLLLWLTDARCDIQMTQSPSSLSASVGDRVTITCRASEDIYFNLVWYQQKPGKAPKLLIYDTNRLADGVPSRFSGSGSGTQYTLTISSLQPEDFATYYCQHYKNYPLTFGQGTKLEIKRSGGGGSGGGGSGGGGSRSEVQLVESGGGLVQPGGSLRLSCAASGFTLSNYGMHWIRQAPGKGLEWVSSISLNGGSTYYRDSVKGRFTISRDNAKSTLYLQMNSLRAEDTAVYYCAAQDAYTGGYFDYWGQGTLVTVSSMPCPAPPVAGPSVFLFPPKPKDTLMIARTPEVTCVVVDVSHEDPEVKFNWYVDGVEVHNAKTKPREEQYNSTYRVVSVLTVLHQDWLNGKEYKCKVSNKALPAPIEKTISKAKPCPAPPVAGPSVFLFPPKPKDTLMIARTPEVTCVVVDVSHEDPEVKFNWYVDGVEVHNAKTKPREEQYNSTYRVVSVLTVLHQDWLNGKEYKCKVSNKALPAPIEKTISKAKMALIVLGGVAGLLLFIGLGIFFMALIVLGGVAGLLLFIGLGIFFCVRCRHRRRSGGGGSAQLEKKLQALKKKNAQLKWKLQALKKKLAQ

SEQ ID NO: 1273 - protein, 482 aa, Artificial Sequence
  source: /note="Description of Artificial Sequence: Synthetic Chimeric Antigen Receptor sequence"
MALPVTALLLPLALLLHAARPEVQLLETGGGLVQPGGSLRLSCAVSGFALSNHGMSWVRRAPGKGLEWVSGIVYSGSTYYAASVKGRFTISRDNSRNTLYLQMNSLRPEDTAIYYCSAHGGESDVWGQGTTVTVSSASGGGGSGGRASGGGGSEIVLTQSPATLSVSPGESATLSCRASQSVSSNLAWYQQKPGQAPRLLIYGASTRASGIPDRFSGSGSGTDFTLTISSLQAEDVAVYYCQQYGSSLTFGGGTKVEIKTTTPAPRPPTPAPTIASQPLSLRPEACRPAAGGAVHTRGLDFACDIYIWAPLAGTCGVLLLSLVITLYCKRGRKKLLYIFKQPFMRPVQTTQEEDGCSCRFPEEEEGGCELRVKFSRSADAPAYKQGQNQLYNELNLGRREEYDVLDKRRGRDPEMGGKPRRKNPQEGLYNELQKDKMAEAYSEIGMKGERRRGKGHDGLYQGLSTATKDTYDALHMQALPPR

SEQ ID NO: 1274 - protein, 222 aa, Artificial Sequence; identical to SEQ ID NO: 1271
  source: /note="Description of Artificial Sequence: Synthetic Chimeric Antigen Receptor sequence"

SEQ ID NO: 1275 - protein, 226 aa, Artificial Sequence; identical to SEQ ID NO: 1221
  source: /note="Description of Artificial Sequence: Synthetic Chimeric Antigen Receptor sequence"

SEQ ID NO: 1276 - protein, 286 aa, Artificial Sequence; identical to SEQ ID NO: 1220
  source: /note="Description of Artificial Sequence: Synthetic Chimeric Antigen Receptor sequence"

SEQ ID NO: 1277 - protein, 487 aa, Artificial Sequence
  source: /note="Description of Artificial Sequence: Synthetic Chimeric Antigen Receptor sequence"
LLVTSLLLCELPHPAFLLIPDTALQLQQSGAELVRPGASVTLSCKASGYTFTDYEMHWVKQTPVHGLEWIGAIDPETGGTAYNQKFEGKAILTADKSSSTAYMELRSLTSEDSPVYYCARRRYYGSSSFDYWGQGTTLTVSSGGGGSGGGGSGGGGSDVQMIQTPSSLSASLGDRVTISCRASQDIGNYLNWYQQKPDGTVKLLIYYTSRLHSGVPSRFSGSGSGTEYSLTISNLEQEDIATYFCQQGSALPPTFGGGTKLEINRAAAIEVMYPPPYLDNEKSNGTIIHVKGKHLCPSPLFPGPSKPFWVLVVVGGVLACYSLLVTVAFIIFWVRSKRSRLLHSDYMNMTPRRPGPTRKHYQPYAPPRDFAAYRSRVKFSRSADAPAYQQGQNQLYNELNLGRREEYDVLDKRRGRDPEMGGKPRRKNPQEGLYNELQKDKMAEAYSEIGMKGERRRGKGHDGLYQGLSTATKDTYDALHMQALPPR

SEQ ID NO: 1278 - protein, 487 aa, Artificial Sequence
  source: /note="Description of Artificial Sequence: Synthetic Chimeric Antigen Receptor sequence"
LLVTSLLLCELPHPAFLLIPDTQVQLQQSGAEVKKPGSSVKVSCKASGYTFTDYEISWVRQAPGQGLEWMGGIDPETGGTNYAQKFQGRVTITADESTSTAYMELSSLRSEDTAVYYCARRRYYGSSSFDYWWGQGTMVTVSSGGGGSGGGGSGGGGSEIVLTQSPATLSLSPGERATLSCRASQDIGNYAWYQQKPGQAPRLLIYYTSRATGIPARFSGSGSGTDFTLTISSLEPEDFAVYYCQQGSALPPTFFGQGTKLEIKRAAAIEVMYPPPYLDNEKSNGTIIHVKGKHLCPSPLFPGPSKPFWVLVVVGGVLACYSLLVTVAFIIFWVRSKRSRLLHSDYMNMTPRRPGPTRKHYQPYAPPRDFAAYRSRVKFSRSADAPAYQQGQNQLYNELNLGRREEYDVLDKRRGRDPEMGGKPRRKNPQEGLYNELQKDKMAEAYSEIGMKGERRRGKGHDGLYQGLSTATKDTYDALHMQALPPR

SEQ ID NO: 1279 - protein, 489 aa, Artificial Sequence
  source: /note="Description of Artificial Sequence: Synthetic Chimeric Antigen Receptor sequence"
LLVTSLLLCELPHPAFLLIPDTDVQLQESGPVLVKTGASVKMSCTASGYTFTDHFMDWVKQSHGKSLEWIGSLNPYSGGTSYNQKFKGKATLTVDKSSSTAYMELNSLTSVDSAVYYCARHNWGAYFDYWGQGTTLTVSSGGGGSGGGGSGGGGSDIVMTQAAPSVPVTPGESVSISCRSSKSLLHSNGNTYLYWFLQRPGQSPQRLIYYMSNLASGVPDRFSGRGSGTDFTLRISRVEAEDVGVYYCMQGLEDPYTFGGGTKLEIKAAAIEVMYPPPYLDNEKSNGTIIHVKGKHLCPSPLFPGPSKPFWVLVVVGGVLACYSLLVTVAFIIFWVRSKRSRLLHSDYMNMTPRRPGPTRKHYQPYAPPRDFAAYRSRVKFSRSADAPAYQQGQNQLYNELNLGRREEYDVLDKRRGRDPEMGGKPRRKNPQEGLYNELQKDKMAEAYSEIGMKGERRRGKGHDGLYQGLSTATKDTYDALHMQALPPR

SEQ ID NO: 1280 - protein, 490 aa, Artificial Sequence
  source: /note="Description of Artificial Sequence: Synthetic Chimeric Antigen Receptor sequence"
LLVTSLLLCELPHPAFLLIPDTDVKLQESGPGLVAPSQSLSITCTVSGFSLTSYAVSWVRQPPGKGLEWLGIIWSGGATNYNSALKSRLSISKDNSKSQVFLKMNGLQTDDTARYYCAREHYYGSSAMDYWGQGASITVSSGGGGSGGGGSGGGGSGIVMTQSPLSLPVSLGDQASISCRSSQSIVHSYGNTYLFWYLQKPGQSPKLLIYRVSNRFSGVPDRFSGSGSGTNFTLKISRVEAEDMGVYYCFQGTHVPYTFGGGTKLEIKAAAIEVMYPPPYLDNEKSNGTIIHVKGKHLCPSPLFPGPSKPFWVLVVVGGVLACYSLLVTVAFIIFWVRSKRSRLLHSDYMNMTPRRPGPTRKHYQPYAPPRDFAAYRSRVKFSRSADAPAYQQGQNQLYNELNLGRREEYDVLDKRRGRDPEMGGKPRRKNPQEGLYNELQKDKMAEAYSEIGMKGERRRGKGHDGLYQGLSTATKDTYDALHMQALPPR

SEQ ID NO: 1281 - protein, 490 aa, Artificial Sequence
  source: /note="Description of Artificial Sequence: Synthetic Chimeric Antigen Receptor sequence"
LLVTSLLLCELPHPAFLLIPDTQVQLQQSGAEVKKPGSSVKVSCKASGYTFTDHFISWVRQAPGQGLEWMGGLNPYSGGTNYAQKFQGRVTITADESTSTAYMELSSLRSEDTAVYYCARHNWGAYFDYWWGQGTMVTVSSGGGGSGGGGSGGGGSEIVLTQSPATLSLSPGERATLSCRASKSLLHSNGNTYAWYQQKPGQAPRLLIYYMSRATGIPARFSGSGSGTDFTLTISSLEPEDFAVYYCMQGLEDPYTFFGQGTKLEIKRAAAIEVMYPPPYLDNEKSNGTIIHVKGKHLCPSPLFPGPSKPFWVLVVVGGVLACYSLLVTVAFIIFWVRSKRSRLLHSDYMNMTPRRPGPTRKHYQPYAPPRDFAAYRSRVKFSRSADAPAYQQGQNQLYNELNLGRREEYDVLDKRRGRDPEMGGKPRRKNPQEGLYNELQKDKMAEAYSEIGMKGERRRGKGHDGLYQGLSTATKDTYDALHMQALPPR

SEQ ID NO: 1282 - protein, 491 aa, Artificial Sequence
  source: /note="Description of Artificial Sequence: Synthetic Chimeric Antigen Receptor sequence"
LLVTSLLLCELPHPAFLLIPDTALQLQQSGAELVRPGASVTLSCKASGYTFTDYEMHWVKQTPVHGLEWIGAIDPETGGTAYNQKFEGKAILTADKSSSTAYMELRSLTSEDSPVYYCARRRYYGSSSFDYWGQGTTLTVSSGGGGSGGGGSGGGGSDVQMIQTPSSLSASLGDRVTISCRASQDIGNYLNWYQQKPDGTVKLLIYYTSRLHSGVPSRFSGSGSGTEYSLTISNLEQEDIATYFCQQGSALPPTFGGGTKLEINRAAATTTPAPRPPTPAPTIASQPLSLRPEACRPAAGGAVHTRGLDFACDIYIWAPLAGTCGVLLLSLVITLYCKRGRKKLLYIFKQPFMRPVQTTQEEDGCSCRFPEEEEGGCELRVKFSRSADAPAYKQGQNQLYNELNLGRREEYDVLDKRRGRDPEMGGKPRRKNPQEGLYNELQKDKMAEAYSEIGMKGERRRGKGHDGLYQGLSTATKDTYDALHMQALPPR

SEQ ID NO: 1283 - protein, 491 aa, Artificial Sequence
  source: /note="Description of Artificial Sequence: Synthetic Chimeric Antigen Receptor sequence"
LLVTSLLLCELPHPAFLLIPDTQVQLQQSGAELVKPGASVKISCKASGYAFSSYWMNWVKQRPGKGLEWIGQIYPGDGDTTYNGKFKGKATLTADKSSSTVYMQLNSLTSEDSAVYFCVRYYYGSSGYFDYWGQGTTLTVSSGGGGSGGGGSGGGGSDVQMIQTPDSLAVSLGQRATISCRASESVDNYGISFMHWYQQKPGQSPKLLIYRASNLESGIPARFSGSGSRTDFTLTINPVETDDVATYYCQQNNKDPPTFGGGTKLEIKRAAAIEVMYPPPYLDNEKSNGTIIHVKGKHLCPSPLFPGPSKPFWVLVVVGGVLACYSLLVTVAFIIFWVRSKRSRLLHSDYMNMTPRRPGPTRKHYQPYAPPRDFAAYRSRVKFSRSADAPAYQQGQNQLYNELNLGRREEYDVLDKRRGRDPEMGGKPRRKNPQEGLYNELQKDKMAEAYSEIGMKGERRRGKGHDGLYQGLSTATKDTYDALHMQALPPR

SEQ ID NO: 1284 - protein, 491 aa, Artificial Sequence
  source: /note="Description of Artificial Sequence: Synthetic Chimeric Antigen Receptor sequence"
LLVTSLLLCELPHPAFLLIPDTQVQLQQSGAEVKKPGSSVKVSCKASGYAFSSYISWVRQAPGQGLEWMGGQIYPGDGDTNYAQKFQGRVTITADESTSTAYMELSSLRSEDTAVYYCVRYYYGSSGYFDYWWGQGTMVTVSSGGGGSGGGGSGGGGSEIVLTQSPATLSLSPGERATLSCRASESVDNYGISFAWYQQKPGQAPRLLIYRASRATGIPARFSGSGSGTDFTLTISSLEPEDFAVYYCQQNNKDPPTFFGQGTKLEIKRAAAIEVMYPPPYLDNEKSNGTIIHVKGKHLCPSPLFPGPSKPFWVLVVVGGVLACYSLLVTVAFIIFWVRSKRSRLLHSDYMNMTPRRPGPTRKHYQPYAPPRDFAAYRSRVKFSRSADAPAYQQGQNQLYNELNLGRREEYDVLDKRRGRDPEMGGKPRRKNPQEGLYNELQKDKMAEAYSEIGMKGERRRGKGHDGLYQGLSTATKDTYDALHMQALPPR

SEQ ID NO: 1285 - protein, 491 aa, Artificial Sequence
  source: /note="Description of Artificial Sequence: Synthetic Chimeric Antigen Receptor sequence"
LLVTSLLLCELPHPAFLLIPDTQVQLQQSGAEVKKPGSSVKVSCKASGYTFTDYEISWVRQAPGQGLEWMGGIDPETGGTNYAQKFQGRVTITADESTSTAYMELSSLRSEDTAVYYCARRRYYGSSSFDYWWGQGTMVTVSSGGGGSGGGGSGGGGSEIVLTQSPATLSLSPGERATLSCRASQDIGNYAWYQQKPGQAPRLLIYYTSRATGIPARFSGSGSGTDFTLTISSLEPEDFAVYYCQQGSALPPTFFGQGTKLEIKRAAATTTPAPRPPTPAPTIASQPLSLRPEACRPAAGGAVHTRGLDFACDIYIWAPLAGTCGVLLLSLVITLYCKRGRKKLLYIFKQPFMRPVQTTQEEDGCSCRFPEEEEGGCELRVKFSRSADAPAYKQGQNQLYNELNLGRREEYDVLDKRRGRDPEMGGKPRRKNPQEGLYNELQKDKMAEAYSEIGMKGERRRGKGHDGLYQGLSTATKDTYDALHMQALPPR

SEQ ID NO: 1286 - protein, 492 aa, Artificial Sequence
  source: /note="Description of Artificial Sequence: Synthetic Chimeric Antigen Receptor sequence"
LLVTSLLLCELPHPAFLLIPDTQVQLQQSGAEVKKPGSSVKVSCKASGFSLTSYAISWVRQAPGQGLEWMGGIIWSGGATNYAQKFQGRVTITADESTSTAYMELSSLRSEDTAVYYCAREHYYGSSAMDYWWGQGTMVTVSSGGGGSGGGGSGGGGSEIVLTQSPATLSLSPGERATLSCRASQSIVHSYGNTYAWYQQKPGQAPRLLIYRVSRATGIPARFSGSGSGTDFTLTISSLEPEDFAVYYCFQGTHVPYTFFGQGTKLEIKRAAAIEVMYPPPYLDNEKSNGTIIHVKGKHLCPSPLFPGPSKPFWVLVVVGGVLACYSLLVTVAFIIFWVRSKRSRLLHSDYMNMTPRRPGPTRKHYQPYAPPRDFAAYRSRVKFSRSADAPAYQQGQNQLYNELNLGRREEYDVLDKRRGRDPEMGGKPRRKNPQEGLYNELQKDKMAEAYSEIGMKGERRRGKGHDGLYQGLSTATKDTYDALHMQALPPR

SEQ ID NO: 1287 - protein, 493 aa, Artificial Sequence
  source: /note="Description of Artificial Sequence: Synthetic Chimeric Antigen Receptor sequence"
LLVTSLLLCELPHPAFLLIPDTDVQLQESGPVLVKTGASVKMSCTASGYTFTDHFMDWVKQSHGKSLEWIGSLNPYSGGTSYNQKFKGKATLTVDKSSSTAYMELNSLTSVDSAVYYCARHNWGAYFDYWGQGTTLTVSSGGGGSGGGGSGGGGSDIVMTQAAPSVPVTPGESVSISCRSSKSLLHSNGNTYLYWFLQRPGQSPQRLIYYMSNLASGVPDRFSGRGSGTDFTLRISRVEAEDVGVYYCMQGLEDPYTFGGGTKLEIKAAATTTPAPRPPTPAPTIASQPLSLRPEACRPAAGGAVHTRGLDFACDIYIWAPLAGTCGVLLLSLVITLYCKRGRKKLLYIFKQPFMRPVQTTQEEDGCSCRFPEEEEGGCELRVKFSRSADAPAYKQGQNQLYNELNLGRREEYDVLDKRRGRDPEMGGKPRRKNPQEGLYNELQKDKMAEAYSEIGMKGERRRGKGHDGLYQGLSTATKDTYDALHMQALPPR

SEQ ID NO: 1288 - protein, 493 aa, Artificial Sequence
  source: /note="Description of Artificial Sequence: Synthetic Chimeric Antigen Receptor sequence"
MALPVTALLLPLALLLHAARPDIVLTQSPPSLAMSLGKRATISCRASESVTILGSHLIHWYQQKPGQPPTLLIQLASNVQTGVPARFSGSGSRTDFTLTIDPVEEDDVAVYYCLQSRTIPRTFGGGTKLEIKGSTSGSGKPGSGEGSTKGQIQLVQSGPELKKPGETVKISCKASGYTFTDYSINWVKRAPGKGLKWMGWINTETREPAYAYDFRGRFAFSLETSASTAYLQINNLKYEDTATYFCALDYSYAMDYWGQGTSVTVSSAAATTTPAPRPPTPAPTIASQPLSLRPEACRPAAGGAVHTRGLDFACDIYIWAPLAGTCGVLLLSLVITLYCKRGRKKLLYIFKQPFMRPVQTTQEEDGCSCRFPEEEEGGCELRVKFSRSADAPAYQQGQNQLYNELNLGRREEYDVLDKRRGRDPEMGGKPRRKNPQEGLYNELQKDKMAEAYSEIGMKGERRRGKGHDGLYQGLSTATKDTYDALHMQALPPR

SEQ ID NO: 1289 - protein, 494 aa, Artificial Sequence
  source: /note="Description of Artificial Sequence: Synthetic Chimeric Antigen Receptor sequence"
LLVTSLLLCELPHPAFLLIPDTDVKLQESGPGLVAPSQSLSITCTVSGFSLTSYAVSWVRQPPGKGLEWLGIIWSGGATNYNSALKSRLSISKDNSKSQVFLKMNGLQTDDTARYYCAREHYYGSSAMDYWGQGASITVSSGGGGSGGGGSGGGGSGIVMTQSPLSLPVSLGDQASISCRSSQSIVHSYGNTYLFWYLQKPGQSPKLLIYRVSNRFSGVPDRFSGSGSGTNFTLKISRVEAEDMGVYYCFQGTHVPYTFGGGTKLEIKAAATTTPAPRPPTPAPTIASQPLSLRPEACRPAAGGAVHTRGLDFACDIYIWAPLAGTCGVLLLSLVITLYCKRGRKKLLYIFKQPFMRPVQTTQEEDGCSCRFPEEEEGGCELRVKFSRSADAPAYKQGQNQLYNELNLGRREEYDVLDKRRGRDPEMGGKPRRKNPQEGLYNELQKDKMAEAYSEIGMKGERRRGKGHDGLYQGLSTATKDTYDALHMQALPPR

SEQ ID NO: 1290 - protein, 494 aa, Artificial Sequence
  source: /note="Description of Artificial Sequence: Synthetic Chimeric Antigen Receptor sequence"
LLVTSLLLCELPHPAFLLIPDTQVQLQQSGAEVKKPGSSVKVSCKASGYTFTDHFISWVRQAPGQGLEWMGGLNPYSGGTNYAQKFQGRVTITADESTSTAYMELSSLRSEDTAVYYCARHNWGAYFDYWWGQGTMVTVSSGGGGSGGGGSGGGGSEIVLTQSPATLSLSPGERATLSCRASKSLLHSNGNTYAWYQQKPGQAPRLLIYYMSRATGIPARFSGSGSGTDFTLTISSLEPEDFAVYYCMQGLEDPYTFFGQGTKLEIKRAAATTTPAPRPPTPAPTIASQPLSLRPEACRPAAGGAVHTRGLDFACDIYIWAPLAGTCGVLLLSLVITLYCKRGRKKLLYIFKQPFMRPVQTTQEEDGCSCRFPEEEEGGCELRVKFSRSADAPAYKQGQNQLYNELNLGRREEYDVLDKRRGRDPEMGGKPRRKNPQEGLYNELQKDKMAEAYSEIGMKGERRRGKGHDGLYQGLSTATKDTYDALHMQALPPR

SEQ ID NO: 1291 - protein, 495 aa, Artificial Sequence
  source: /note="Description of Artificial Sequence: Synthetic Chimeric Antigen Receptor sequence"
LLVTSLLLCELPHPAFLLIPDTQVQLQQSGAELVKPGASVKISCKASGYAFSSYWMNWVKQRPGKGLEWIGQIYPGDGDTTYNGKFKGKATLTADKSSSTVYMQLNSLTSEDSAVYFCVRYYYGSSGYFDYWGQGTTLTVSSGGGGSGGGGSGGGGSDVQMIQTPDSLAVSLGQRATISCRASESVDNYGISFMHWYQQKPGQSPKLLIYRASNLESGIPARFSGSGSRTDFTLTINPVETDDVATYYCQQNNKDPPTFGGGTKLEIKRAAATTTPAPRPPTPAPTIASQPLSLRPEACRPAAGGAVHTRGLDFACDIYIWAPLAGTCGVLLLSLVITLYCKRGRKKLLYIFKQPFMRPVQTTQEEDGCSCRFPEEEEGGCELRVKFSRSADAPAYKQGQNQLYNELNLGRREEYDVLDKRRGRDPEMGGKPRRKNPQEGLYNELQKDKMAEAYSEIGMKGERRRGKGHDGLYQGLSTATKDTYDALHMQALPPR

SEQ ID NO: 1292 - protein, 495 aa, Artificial Sequence
  source: /note="Description of Artificial Sequence: Synthetic Chimeric Antigen Receptor sequence"
LLVTSLLLCELPHPAFLLIPDTQVQLQQSGAEVKKPGSSVKVSCKASGYAFSSYISWVRQAPGQGLEWMGGQIYPGDGDTNYAQKFQGRVTITADESTSTAYMELSSLRSEDTAVYYCVRYYYGSSGYFDYWWGQGTMVTVSSGGGGSGGGGSGGGGSEIVLTQSPATLSLSPGERATLSCRASESVDNYGISFAWYQQKPGQAPRLLIYRASRATGIPARFSGSGSGTDFTLTISSLEPEDFAVYYCQQNNKDPPTFFGQGTKLEIKRAAATTTPAPRPPTPAPTIASQPLSLRPEACRPAAGGAVHTRGLDFACDIYIWAPLAGTCGVLLLSLVITLYCKRGRKKLLYIFKQPFMRPVQTTQEEDGCSCRFPEEEEGGCELRVKFSRSADAPAYKQGQNQLYNELNLGRREEYDVLDKRRGRDPEMGGKPRRKNPQEGLYNELQKDKMAEAYSEIGMKGERRRGKGHDGLYQGLSTATKDTYDALHMQALPPR

SEQ ID NO: 1293 - protein, 496 aa, Artificial Sequence
  source: /note="Description of Artificial Sequence: Synthetic Chimeric Antigen Receptor sequence"
LLVTSLLLCELPHPAFLLIPDTQVQLQQSGAEVKKPGSSVKVSCKASGFSLTSYAISWVRQAPGQGLEWMGGIIWSGGATNYAQKFQGRVTITADESTSTAYMELSSLRSEDTAVYYCAREHYYGSSAMDYWWGQGTMVTVSSGGGGSGGGGSGGGGSEIVLTQSPATLSLSPGERATLSCRASQSIVHSYGNTYAWYQQKPGQAPRLLIYRVSRATGIPARFSGSGSGTDFTLTISSLEPEDFAVYYCFQGTHVPYTFFGQGTKLEIKRAAATTTPAPRPPTPAPTIASQPLSLRPEACRPAAGGAVHTRGLDFACDIYIWAPLAGTCGVLLLSLVITLYCKRGRKKLLYIFKQPFMRPVQTTQEEDGCSCRFPEEEEGGCELRVKFSRSADAPAYKQGQNQLYNELNLGRREEYDVLDKRRGRDPEMGGKPRRKNPQEGLYNELQKDKMAEAYSEIGMKGERRRGKGHDGLYQGLSTATKDTYDALHMQALPPR

SEQ ID NO: 1294 - protein, 551 aa, Artificial Sequence
  source: /note="Description of Artificial Sequence: Synthetic Chimeric Antigen Receptor sequence"
LLVTSLLLCELPHPAFLLIPDTALQLQQSGAELVRPGASVTLSCKASGYTFTDYEMHWVKQTPVHGLEWIGAIDPETGGTAYNQKFEGKAILTADKSSSTAYMELRSLTSEDSPVYYCARRRYYGSSSFDYWGQGTTLTVSSGGGGSGGGGSGGGGSDVQMIQTPSSLSASLGDRVTISCRASQDIGNYLNWYQQKPDGTVKLLIYYTSRLHSGVPSRFSGSGSGTEYSLTISNLEQEDIATYFCQQGSALPPTFGGGTKLEINRAAAFVPVFLPAKPTTTPAPRPPTPAPTIASQPLSLRPEACRPAAGGAVHTRGLDFACDIYIWAPLAGTCGVLLLSLVITLYCNHRNRSKRSRLLHSDYMNMTPRRPGPTRKHYQPYAPPRDFAAYRSRFSVVKRGRKKLLYIFKQPFMRPVQTTQEEDGCSCRFPEEEEGGCELRVKFSRSADAPAYQQGQNQLYNELNLGRREEYDVLDKRRGRDPEMGGKPRRKNPQEGLYNELQKDKMAEAYSEIGMKGERRRGKGHDGLYQGLSTATKDTYDALHMQALPPR

SEQ ID NO: 1295 - protein, 551 aa, Artificial Sequence
  source: /note="Description of Artificial Sequence: Synthetic Chimeric Antigen Receptor sequence"
LLVTSLLLCELPHPAFLLIPDTQVQLQQSGAEVKKPGSSVKVSCKASGYTFTDYEISWVRQAPGQGLEWMGGIDPETGGTNYAQKFQGRVTITADESTSTAYMELSSLRSEDTAVYYCARRRYYGSSSFDYWWGQGTMVTVSSGGGGSGGGGSGGGGSEIVLTQSPATLSLSPGERATLSCRASQDIGNYAWYQQKPGQAPRLLIYYTSRATGIPARFSGSGSGTDFTLTISSLEPEDFAVYYCQQGSALPPTFFGQGTKLEIKRAAAFVPVFLPAKPTTTPAPRPPTPAPTIASQPLSLRPEACRPAAGGAVHTRGLDFACDIYIWAPLAGTCGVLLLSLVITLYCNHRNRSKRSRLLHSDYMNMTPRRPGPTRKHYQPYAPPRDFAAYRSRFSVVKRGRKKLLYIFKQPFMRPVQTTQEEDGCSCRFPEEEEGGCELRVKFSRSADAPAYQQGQNQLYNELNLGRREEYDVLDKRRGRDPEMGGKPRRKNPQEGLYNELQKDKMAEAYSEIGMKGERRRGKGHDGLYQGLSTATKDTYDALHMQALPPR

SEQ ID NO: 1296 - protein, 553 aa, Artificial Sequence
  source: /note="Description of Artificial Sequence: Synthetic Chimeric Antigen Receptor sequence"
LLVTSLLLCELPHPAFLLIPDTDVQLQESGPVLVKTGASVKMSCTASGYTFTDHFMDWVKQSHGKSLEWIGSLNPYSGGTSYNQKFKGKATLTVDKSSSTAYMELNSLTSVDSAVYYCARHNWGAYFDYWGQGTTLTVSSGGGGSGGGGSGGGGSDIVMTQAAPSVPVTPGESVSISCRSSKSLLHSNGNTYLYWFLQRPGQSPQRLIYYMSNLASGVPDRFSGRGSGTDFTLRISRVEAEDVGVYYCMQGLEDPYTFGGGTKLEIKAAAFVPVFLPAKPTTTPAPRPPTPAPTIASQPLSLRPEACRPAAGGAVHTRGLDFACDIYIWAPLAGTCGVLLLSLVITLYCNHRNRSKRSRLLHSDYMNMTPRRPGPTRKHYQPYAPPRDFAAYRSRFSVVKRGRKKLLYIFKQPFMRPVQTTQEEDGCSCRFPEEEEGGCELRVKFSRSADAPAYQQGQNQLYNELNLGRREEYDVLDKRRGRDPEMGGKPRRKNPQEGLYNELQKDKMAEAYSEIGMKGERRRGKGHDGLYQGLSTATKDTYDALHMQALPPR

SEQ ID NO: 1297 - protein, 554 aa, Artificial Sequence
  source: /note="Description of Artificial Sequence: Synthetic Chimeric Antigen Receptor sequence"
LLVTSLLLCELPHPAFLLIPDTDVKLQESGPGLVAPSQSLSITCTVSGFSLTSYAVSWVRQPPGKGLEWLGIIWSGGATNYNSALKSRLSISKDNSKSQVFLKMNGLQTDDTARYYCAREHYYGSSAMDYWGQGASITVSSGGGGSGGGGSGGGGSGIVMTQSPLSLPVSLGDQASISCRSSQSIVHSYGNTYLFWYLQKPGQSPKLLIYRVSNRFSGVPDRFSGSGSGTNFTLKISRVEAEDMGVYYCFQGTHVPYTFGGGTKLEIKAAAFVPVFLPAKPTTTPAPRPPTPAPTIASQPLSLRPEACRPAAGGAVHTRGLDFACDIYIWAPLAGTCGVLLLSLVITLYCNHRNRSKRSRLLHSDYMNMTPRRPGPTRKHYQPYAPPRDFAAYRSRFSVVKRGRKKLLYIFKQPFMRPVQTTQEEDGCSCRFPEEEEGGCELRVKFSRSADAPAYQQGQNQLYNELNLGRREEYDVLDKRRGRDPEMGGKPRRKNPQEGLYNELQKDKMAEAYSEIGMKGERRRGKGHDGLYQGLSTATKDTYDALHMQALPPR

SEQ ID NO: 1298 - protein, 554 aa, Artificial Sequence
  source: /note="Description of Artificial Sequence: Synthetic Chimeric Antigen Receptor sequence"
LLVTSLLLCELPHPAFLLIPDTQVQLQQSGAEVKKPGSSVKVSCKASGYTFTDHFISWVRQAPGQGLEWMGGLNPYSGGTNYAQKFQGRVTITADESTSTAYMELSSLRSEDTAVYYCARHNWGAYFDYWWGQGTMVTVSSGGGGSGGGGSGGGGSEIVLTQSPATLSLSPGERATLSCRASKSLLHSNGNTYAWYQQKPGQAPRLLIYYMSRATGIPARFSGSGSGTDFTLTISSLEPEDFAVYYCMQGLEDPYTFFGQGTKLEIKRAAAFVPVFLPAKPTTTPAPRPPTPAPTIASQPLSLRPEACRPAAGGAVHTRGLDFACDIYIWAPLAGTCGVLLLSLVITLYCNHRNRSKRSRLLHSDYMNMTPRRPGPTRKHYQPYAPPRDFAAYRSRFSVVKRGRKKLLYIFKQPFMRPVQTTQEEDGCSCRFPEEEEGGCELRVKFSRSADAPAYQQGQNQLYNELNLGRREEYDVLDKRRGRDPEMGGKPRRKNPQEGLYNELQKDKMAEAYSEIGMKGERRRGKGHDGLYQGLSTATKDTYDALHMQALPPR

SEQ ID NO: 1299 - protein, 555 aa, Artificial Sequence
  source: /note="Description of Artificial Sequence: Synthetic Chimeric Antigen Receptor sequence"
LLVTSLLLCELPHPAFLLIPDTQVQLQQSGAELVKPGASVKISCKASGYAFSSYWMNWVKQRPGKGLEWIGQIYPGDGDTTYNGKFKGKATLTADKSSSTVYMQLNSLTSEDSAVYFCVRYYYGSSGYFDYWGQGTTLTVSSGGGGSGGGGSGGGGSDVQMIQTPDSLAVSLGQRATISCRASESVDNYGISFMHWYQQKPGQSPKLLIYRASNLESGIPARFSGSGSRTDFTLTINPVETDDVATYYCQQNNKDPPTFGGGTKLEIKRAAAFVPVFLPAKPTTTPAPRPPTPAPTIASQPLSLRPEACRPAAGGAVHTRGLDFACDIYIWAPLAGTCGVLLLSLVITLYCNHRNRSKRSRLLHSDYMNMTPRRPGPTRKHYQPYAPPRDFAAYRSRFSVVKRGRKKLLYIFKQPFMRPVQTTQEEDGCSCRFPEEEEGGCELRVKFSRSADAPAYQQGQNQLYNELNLGRREEYDVLDKRRGRDPEMGGKPRRKNPQEGLYNELQKDKMAEAYSEIGMKGERRRGKGHDGLYQGLSTATKDTYDALHMQALPPR

SEQ ID NO: 1300 - protein, 555 aa, Artificial Sequence
  source: /note="Description of Artificial Sequence: Synthetic Chimeric Antigen Receptor sequence"
LLVTSLLLCELPHPAFLLIPDTQVQLQQSGAEVKKPGSSVKVSCKASGYAFSSYISWVRQAPGQGLEWMGGQIYPGDGDTNYAQKFQGRVTITADESTSTAYMELSSLRSEDTAVYYCVRYYYGSSGYFDYWWGQGTMVTVSSGGGGSGGGGSGGGGSEIVLTQSPATLSLSPGERATLSCRASESVDNYGISFAWYQQKPGQAPRLLIYRASRATGIPARFSGSGSGTDFTLTISSLEPEDFAVYYCQQNNKDPPTFFGQGTKLEIKRAAAFVPVFLPAKPTTTPAPRPPTPAPTIASQPLSLRPEACRPAAGGAVHTRGLDFACDIYIWAPLAGTCGVLLLSLVITLYCNHRNRSKRSRLLHSDYMNMTPRRPGPTRKHYQPYAPPRDFAAYRSRFSVVKRGRKKLLYIFKQPFMRPVQTTQEEDGCSCRFPEEEEGGCELRVKFSRSADAPAYQQGQNQLYNELNLGRREEYDVLDKRRGRDPEMGGKPRRKNPQEGLYNELQKDKMAEAYSEIGMKGERRRGKGHDGLYQGLSTATKDTYDALHMQALPPR

SEQ ID NO: 1301 - protein, 556 aa, Artificial Sequence
  source: /note="Description of Artificial Sequence: Synthetic Chimeric Antigen Receptor sequence"
LLVTSLLLCELPHPAFLLIPDTQVQLQQSGAEVKKPGSSVKVSCKASGFSLTSYAISWVRQAPGQGLEWMGGIIWSGGATNYAQKFQGRVTITADESTSTAYMELSSLRSEDTAVYYCAREHYYGSSAMDYWWGQGTMVTVSSGGGGSGGGGSGGGGSEIVLTQSPATLSLSPGERATLSCRASQSIVHSYGNTYAWYQQKPGQAPRLLIYRVSRATGIPARFSGSGSGTDFTLTISSLEPEDFAVYYCFQGTHVPYTFFGQGTKLEIKRAAAFVPVFLPAKPTTTPAPRPPTPAPTIASQPLSLRPEACRPAAGGAVHTRGLDFACDIYIWAPLAGTCGVLLLSLVITLYCNHRNRSKRSRLLHSDYMNMTPRRPGPTRKHYQPYAPPRDFAAYRSRFSVVKRGRKKLLYIFKQPFMRPVQTTQEEDGCSCRFPEEEEGGCELRVKFSRSADAPAYQQGQNQLYNELNLGRREEYDVLDKRRGRDPEMGGKPRRKNPQEGLYNELQKDKMAEAYSEIGMKGERRRGKGHDGLYQGLSTATKDTYDALHMQALPPR

SEQ ID NO: 1302 - protein, 724 aa, Artificial Sequence
  source: /note="Description of Artificial Sequence: Synthetic Chimeric Antigen Receptor sequence"
LLVTSLLLCELPHPAFLLIPDTALQLQQSGAELVRPGASVTLSCKASGYTFTDYEMHWVKQTPVHGLEWIGAIDPETGGTAYNQKFEGKAILTADKSSSTAYMELRSLTSEDSPVYYCARRRYYGSSSFDYWGQGTTLTVSSGGGGSGGGGSGGGGSDVQMIQTPSSLSASLGDRVTISCRASQDIGNYLNWYQQKPDGTVKLLIYYTSRLHSGVPSRFSGSGSGTEYSLTISNLEQEDIATYFCQQGSALPPTFGGGTKLEINRAEPKSCDKTHTCPPCPAPELLGGPSVFLFPPKPKDTLMISRTPEVTCVVVDVSHEDPEVKFNWYVDGVEVHNAKTKPREEQYNSTYRVVSVLTVLHQDWLNGKEYKCKVSNKALPAPIEKTISKAKGQPREPQVYTLPPSRDELTKNQVSLTCLVKGFYPSDIAVEWESNGQPENNYKTTPPVLDSDGSFFLYSKLTVDKSRWQQGNVFSCSVMHEALHNHYTQKSLSLSPGKKDPKAAAIEVMYPPPYLDNEKSNGTIIHVKGKHLCPSPLFPGPSKPFWVLVVVGGVLACYSLLVTVAFIIFWVRSKRSRLLHSDYMNMTPRRPGPTRKHYQPYAPPRDFAAYRSRVKFSRSADAPAYQQGQNQLYNELNLGRREEYDVLDKRRGRDPEMGGKPRRKNPQEGLYNELQKDKMAEAYSEIGMKGERRRGKGHDGLYQGLSTATKDTYDALHMQALPPR

SEQ ID NO: 1303 - protein, 724 aa, Artificial Sequence
  source: /note="Description of Artificial Sequence: Synthetic Chimeric Antigen Receptor sequence"
LLVTSLLLCELPHPAFLLIPDTQVQLQQSGAEVKKPGSSVKVSCKASGYTFTDYEISWVRQAPGQGLEWMGGIDPETGGTNYAQKFQGRVTITADESTSTAYMELSSLRSEDTAVYYCARRRYYGSSSFDYWWGQGTMVTVSSGGGGSGGGGSGGGGSEIVLTQSPATLSLSPGERATLSCRASQDIGNYAWYQQKPGQAPRLLIYYTSRATGIPARFSGSGSGTDFTLTISSLEPEDFAVYYCQQGSALPPTFFGQGTKLEIKRAEPKSCDKTHTCPPCPAPELLGGPSVFLFPPKPKDTLMISRTPEVTCVVVDVSHEDPEVKFNWYVDGVEVHNAKTKPREEQYNSTYRVVSVLTVLHQDWLNGKEYKCKVSNKALPAPIEKTISKAKGQPREPQVYTLPPSRDELTKNQVSLTCLVKGFYPSDIAVEWESNGQPENNYKTTPPVLDSDGSFFLYSKLTVDKSRWQQGNVFSCSVMHEALHNHYTQKSLSLSPGKKDPKAAAIEVMYPPPYLDNEKSNGTIIHVKGKHLCPSPLFPGPSKPFWVLVVVGGVLACYSLLVTVAFIIFWVRSKRSRLLHSDYMNMTPRRPGPTRKHYQPYAPPRDFAAYRSRVKFSRSADAPAYQQGQNQLYNELNLGRREEYDVLDKRRGRDPEMGGKPRRKNPQEGLYNELQKDKMAEAYSEIGMKGERRRGKGHDGLYQGLSTATKDTYDALHMQALPPR

SEQ ID NO: 1304 - protein, 725 aa, Artificial Sequence
  source: /note="Description of Artificial Sequence: Synthetic Chimeric Antigen Receptor sequence"
LLVTSLLLCELPHPAFLLIPDTDVQLQESGPVLVKTGASVKMSCTASGYTFTDHFMDWVKQSHGKSLEWIGSLNPYSGGTSYNQKFKGKATLTVDKSSSTAYMELNSLTSVDSAVYYCARHNWGAYFDYWGQGTTLTVSSGGGGSGGGGSGGGGSDIVMTQAAPSVPVTPGESVSISCRSSKSLLHSNGNTYLYWFLQRPGQSPQRLIYYMSNLASGVPDRFSGRGSGTDFTLRISRVEAEDVGVYYCMQGLEDPYTFGGGTKLEIKEPKSCDKTHTCPPCPAPELLGGPSVFLFPPKPKDTLMISRTPEVTCVVVDVSHEDPEVKFNWYVDGVEVHNAKTKPREEQYNSTYRVVSVLTVLHQDWLNGKEYKCKVSNKALPAPIEKTISKAKGQPREPQVYTLPPSRDELTKNQVSLTCLVKGFYPSDIAVEWESNGQPENNYKTTPPVLDSDGSFFLYSKLTVDKSRWQQGNVFSCSVMHEALHNHYTQKSLSLSPGKKDPKAAAIEVMYPPPYLDNEKSNGTIIHVKGKHLCPSPLFPGPSKPFWVLVVVGGVLACYSLLVTVAFIIFWVRSKRSRLLHSDYMNMTPRRPGPTRKHYQPYAPPRDFAAYRSRVKFSRSADAPAYQQGQNQLYNELNLGRREEYDVLDKRRGRDPEMGGKPRRKNPQEGLYNELQKDKMAEAYSEIGMKGERRRGKGHDGLYQGLSTATKDTYDALHMQALPPR

SEQ ID NO: 1305 - protein, 726 aa, Artificial Sequence
  source: /note="Description of Artificial Sequence: Synthetic Chimeric Antigen Receptor sequence"
LLVTSLLLCELPHPAFLLIPDTQVQLQQSGAEVKKPGSSVKVSCKASGYTFTDHFISWVRQAPGQGLEWMGGLNPYSGGTNYAQKFQGRVTITADESTSTAYMELSSLRSEDTAVYYCARHNWGAYFDYWWGQGTMVTVSSGGGGSGGGGSGGGGSEIVLTQSPATLSLSPGERATLSCRASKSLLHSNGNTYAWYQQKPGQAPRLLIYYMSRATGIPARFSGSGSGTDFTLTISSLEPEDFAVYYCMQGLEDPYTFFGQGTKLEIKREPKSCDKTHTCPPCPAPELLGGPSVFLFPPKPKDTLMISRTPEVTCVVVDVSHEDPEVKFNWYVDGVEVHNAKTKPREEQYNSTYRVVSVLTVLHQDWLNGKEYKCKVSNKALPAPIEKTISKAKGQPREPQVYTLPPSRDELTKNQVSLTCLVKGFYPSDIAVEWESNGQPENNYKTTPPVLDSDGSFFLYSKLTVDKSRWQQGNVFSCSVMHEALHNHYTQKSLSLSPGKKDPKAAAIEVMYPPPYLDNEKSNGTIIHVKGKHLCPSPLFPGPSKPFWVLVVVGGVLACYSLLVTVAFIIFWVRSKRSRLLHSDYMNMTPRRPGPTRKHYQPYAPPRDFAAYRSRVKFSRSADAPAYQQGQNQLYNELNLGRREEYDVLDKRRGRDPEMGGKPRRKNPQEGLYNELQKDKMAEAYSEIGMKGERRRGKGHDGLYQGLSTATKDTYDALHMQALPPR

SEQ ID NO: 1306 - protein, 728 aa, Artificial Sequence
  source: /note="Description of Artificial Sequence: Synthetic Chimeric Antigen Receptor sequence"
LLVTSLLLCELPHPAFLLIPDTALQLQQSGAELVRPGASVTLSCKASGYTFTDYEMHWVKQTPVHGLEWIGAIDPETGGTAYNQKFEGKAILTADKSSSTAYMELRSLTSEDSPVYYCARRRYYGSSSFDYWGQGTTLTVSSGGGGSGGGGSGGGGSDVQMIQTPSSLSASLGDRVTISCRASQDIGNYLNWYQQKPDGTVKLLIYYTSRLHSGVPSRFSGSGSGTEYSLTISNLEQEDIATYFCQQGSALPPTFGGGTKLEINRAEPKSCDKTHTCPPCPAPELLGGPSVFLFPPKPKDTLMISRTPEVTCVVVDVSHEDPEVKFNWYVDGVEVHNAKTKPREEQYNSTYRVVSVLTVLHQDWLNGKEYKCKVSNKALPAPIEKTISKAKGQPREPQVYTLPPSRDELTKNQVSLTCLVKGFYPSDIAVEWESNGQPENNYKTTPPVLDSDGSFFLYSKLTVDKSRWQQGNVFSCSVMHEALHNHYTQKSLSLSPGKKDPKAAATTTPAPRPPTPAPTIASQPLSLRPEACRPAAGGAVHTRGLDFACDIYIWAPLAGTCGVLLLSLVITLYCKRGRKKLLYIFKQPFMRPVQTTQEEDGCSCRFPEEEEGGCELRVKFSRSADAPAYKQGQNQLYNELNLGRREEYDVLDKRRGRDPEMGGKPRRKNPQEGLYNELQKDKMAEAYSEIGMKGERRRGKGHDGLYQGLSTATKDTYDALHMQALPPR

SEQ ID NO: 1307 - protein, 728 aa, Artificial Sequence
  source: /note="Description of Artificial Sequence: Synthetic Chimeric Antigen Receptor sequence"
LLVTSLLLCELPHPAFLLIPDTQVQLQQSGAELVKPGASVKISCKASGYAFSSYWMNWVKQRPGKGLEWIGQIYPGDGDTTYNGKFKGKATLTADKSSSTVYMQLNSLTSEDSAVYFCVRYYYGSSGYFDYWGQGTTLTVSSGGGGSGGGGSGGGGSDVQMIQTPDSLAVSLGQRATISCRASESVDNYGISFMHWYQQKPGQSPKLLIYRASNLESGIPARFSGSGSRTDFTLTINPVETDDVATYYCQQNNKDPPTFGGGTKLEIKRAEPKSCDKTHTCPPCPAPELLGGPSVFLFPPKPKDTLMISRTPEVTCVVVDVSHEDPEVKFNWYVDGVEVHNAKTKPREEQYNSTYRVVSVLTVLHQDWLNGKEYKCKVSNKALPAPIEKTISKAKGQPREPQVYTLPPSRDELTKNQVSLTCLVKGFYPSDIAVEWESNGQPENNYKTTPPVLDSDGSFFLYSKLTVDKSRWQQGNVFSCSVMHEALHNHYTQKSLSLSPGKKDPKAAAIEVMYPPPYLDNEKSNGTIIHVKGKHLCPSPLFPGPSKPFWVLVVVGGVLACYSLLVTVAFIIFWVRSKRSRLLHSDYMNMTPRRPGPTRKHYQPYAPPRDFAAYRSRVKFSRSADAPAYQQGQNQLYNELNLGRREEYDVLDKRRGRDPEMGGKPRRKNPQEGLYNELQKDKMAEAYSEIGMKGERRRGKGHDGLYQGLSTATKDTYDALHMQALPPR

SEQ ID NO: 1308 - protein, 728 aa, Artificial Sequence
  source: /note="Description of Artificial Sequence: Synthetic Chimeric Antigen Receptor sequence"
LLVTSLLLCELPHPAFLLIPDTQVQLQQSGAEVKKPGSSVKVSCKASGFSLTSYAISWVRQAPGQGLEWMGGIIWSGGATNYAQKFQGRVTITADESTSTAYMELSSLRSEDTAVYYCAREHYYGSSAMDYWWGQGTMVTVSSGGGGSGGGGSGGGGSEIVLTQSPATLSLSPGERATLSCRASQSIVHSYGNTYAWYQQKPGQAPRLLIYRVSRATGIPARFSGSGSGTDFTLTISSLEPEDFAVYYCFQGTHVPYTFFGQGTKLEIKREPKSCDKTHTCPPCPAPELLGGPSVFLFPPKPKDTLMISRTPEVTCVVVDVSHEDPEVKFNWYVDGVEVHNAKTKPREEQYNSTYRVVSVLTVLHQDWLNGKEYKCKVSNKALPAPIEKTISKAKGQPREPQVYTLPPSRDELTKNQVSLTCLVKGFYPSDIAVEWESNGQPENNYKTTPPVLDSDGSFFLYSKLTVDKSRWQQGNVFSCSVMHEALHNHYTQKSLSLSPGKKDPKAAAIEVMYPPPYLDNEKSNGTIIHVKGKHLCPSPLFPGPSKPFWVLVVVGGVLACYSLLVTVAFIIFWVRSKRSRLLHSDYMNMTPRRPGPTRKHYQPYAPPRDFAAYRSRVKFSRSADAPAYQQGQNQLYNELNLGRREEYDVLDKRRGRDPEMGGKPRRKNPQEGLYNELQKDKMAEAYSEIGMKGERRRGKGHDGLYQGLSTATKDTYDALHMQALPPR

SEQ ID NO: 1309 - protein, 728 aa, Artificial Sequence
  source: /note="Description of Artificial Sequence: Synthetic Chimeric Antigen Receptor sequence"
LLVTSLLLCELPHPAFLLIPDTQVQLQQSGAEVKKPGSSVKVSCKASGYAFSSYISWVRQAPGQGLEWMGGQIYPGDGDTNYAQKFQGRVTITADESTSTAYMELSSLRSEDTAVYYCVRYYYGSSGYFDYWWGQGTMVTVSSGGGGSGGGGSGGGGSEIVLTQSPATLSLSPGERATLSCRASESVDNYGISFAWYQQKPGQAPRLLIYRASRATGIPARFSGSGSGTDFTLTISSLEPEDFAVYYCQQNNKDPPTFFGQGTKLEIKRAEPKSCDKTHTCPPCPAPELLGGPSVFLFPPKPKDTLMISRTPEVTCVVVDVSHEDPEVKFNWYVDGVEVHNAKTKPREEQYNSTYRVVSVLTVLHQDWLNGKEYKCKVSNKALPAPIEKTISKAKGQPREPQVYTLPPSRDELTKNQVSLTCLVKGFYPSDIAVEWESNGQPENNYKTTPPVLDSDGSFFLYSKLTVDKSRWQQGNVFSCSVMHEALHNHYTQKSLSLSPGKKDPKAAAIEVMYPPPYLDNEKSNGTIIHVKGKHLCPSPLFPGPSKPFWVLVVVGGVLACYSLLVTVAFIIFWVRSKRSRLLHSDYMNMTPRRPGPTRKHYQPYAPPRDFAAYRSRVKFSRSADAPAYQQGQNQLYNELNLGRREEYDVLDKRRGRDPEMGGKPRRKNPQEGLYNELQKDKMAEAYSEIGMKGERRRGKGHDGLYQGLSTATKDTYDALHMQALPPR

SEQ ID NO: 1310 - protein, 728 aa, Artificial Sequence
  source: /note="Description of Artificial Sequence: Synthetic Chimeric Antigen Receptor sequence"
LLVTSLLLCELPHPAFLLIPDTQVQLQQSGAEVKKPGSSVKVSCKASGYTFTDYEISWVRQAPGQGLEWMGGIDPETGGTNYAQKFQGRVTITADESTSTAYMELSSLRSEDTAVYYCARRRYYGSSSFDYWWGQGTMVTVSSGGGGSGGGGSGGGGSEIVLTQSPATLSLSPGERATLSCRASQDIGNYAWYQQKPGQAPRLLIYYTSRATGIPARFSGSGSGTDFTLTISSLEPEDFAVYYCQQGSALPPTFFGQGTKLEIKRAEPKSCDKTHTCPPCPAPELLGGPSVFLFPPKPKDTLMISRTPEVTCVVVDVSHEDPEVKFNWYVDGVEVHNAKTKPREEQYNSTYRVVSVLTVLHQDWLNGKEYKCKVSNKALPAPIEKTISKAKGQPREPQVYTLPPSRDELTKNQVSLTCLVKGFYPSDIAVEWESNGQPENNYKTTPPVLDSDGSFFLYSKLTVDKSRWQQGNVFSCSVMHEALHNHYTQKSLSLSPGKKDPKAAATTTPAPRPPTPAPTIASQPLSLRPEACRPAAGGAVHTRGLDFACDIYIWAPLAGTCGVLLLSLVITLYCKRGRKKLLYIFKQPFMRPVQTTQEEDGCSCRFPEEEEGGCELRVKFSRSADAPAYKQGQNQLYNELNLGRREEYDVLDKRRGRDPEMGGKPRRKNPQEGLYNELQKDKMAEAYSEIGMKGERRRGKGHDGLYQGLSTATKDTYDALHMQALPPR

SEQ ID NO: 1311 - protein, 729 aa, Artificial Sequence
  source: /note="Description of Artificial Sequence: Synthetic Chimeric Antigen Receptor sequence"
LLVTSLLLCELPHPAFLLIPDTDVQLQESGPVLVKTGASVKMSCTASGYTFTDHFMDWVKQSHGKSLEWIGSLNPYSGGTSYNQKFKGKATLTVDKSSSTAYMELNSLTSVDSAVYYCARHNWGAYFDYWGQGTTLTVSSGGGGSGGGGSGGGGSDIVMTQAAPSVPVTPGESVSISCRSSKSLLHSNGNTYLYWFLQRPGQSPQRLIYYMSNLASGVPDRFSGRGSGTDFTLRISRVEAEDVGVYYCMQGLEDPYTFGGGTKLEIKEPKSCDKTHTCPPCPAPELLGGPSVFLFPPKPKDTLMISRTPEVTCVVVDVSHEDPEVKFNWYVDGVEVHNAKTKPREEQYNSTYRVVSVLTVLHQDWLNGKEYKCKVSNKALPAPIEKTISKAKGQPREPQVYTLPPSRDELTKNQVSLTCLVKGFYPSDIAVEWESNGQPENNYKTTPPVLDSDGSFFLYSKLTVDKSRWQQGNVFSCSVMHEALHNHYTQKSLSLSPGKKDPKAAATTTPAPRPPTPAPTIASQPLSLRPEACRPAAGGAVHTRGLDFACDIYIWAPLAGTCGVLLLSLVITLYCKRGRKKLLYIFKQPFMRPVQTTQEEDGCSCRFPEEEEGGCELRVKFSRSADAPAYKQGQNQLYNELNLGRREEYDVLDKRRGRDPEMGGKPRRKNPQEGLYNELQKDKMAEAYSEIGMKGERRRGKGHDGLYQGLSTATKDTYDALHMQALPPR

SEQ ID NO: 1312 - protein, 730 aa, Artificial Sequence
  source: /note="Description of Artificial Sequence: Synthetic Chimeric Antigen Receptor sequence"
LLVTSLLLCELPHPAFLLIPDTDVKLQESGPGLVAPSQSLSITCTVSGFSLTSYAVSWVRQPPGKGLEWLGIIWSGGATNYNSALKSRLSISKDNSKSQVFLKMNGLQTDDTARYYCAREHYYGSSAMDYWGQGASITVSSGGGGSGGGGSGGGGSGIVMTQSPLSLPVSLGDQASISCRSSQSIVHSYGNTYLFWYLQKPGQSPKLLIYRVSNRFSGVPDRFSGSGSGTNFTLKISRVEAEDMGVYYCFQGTHVPYTFGGGTKLEIKEPKSCDKTHTCPPCPAPELLGGPSVFLFPPKPKDTLMISRTPEVTCVVVDVSHEDPEVKFNWYVDGVEVHNAKTKPREEQYNSTYRVVSVLTVLHQDWLNGKEYKCKVSNKALPAPIEKTISKAKGQPREPQVYTLPPSRDELTKNQVSLTCLVKGFYPSDIAVEWESNGQPENNYKTTPPVLDSDGSFFLYSKLTVDKSRWQQGNVFSCSVMHEALHNHYTQKSLSLSPGKKDPKAAATTTPAPRPPTPAPTIASQPLSLRPEACRPAAGGAVHTRGLDFACDIYIWAPLAGTCGVLLLSLVITLYCKRGRKKLLYIFKQPFMRPVQTTQEEDGCSCRFPEEEEGGCELRVKFSRSADAPAYKQGQNQLYNELNLGRREEYDVLDKRRGRDPEMGGKPRRKNPQEGLYNELQKDKMAEAYSEIGMKGERRRGKGHDGLYQGLSTATKDTYDALHMQALPPR

SEQ ID NO: 1313 - protein, 730 aa, Artificial Sequence
  source: /note="Description of Artificial Sequence: Synthetic Chimeric Antigen Receptor sequence"
LLVTSLLLCELPHPAFLLIPDTQVQLQQSGAEVKKPGSSVKVSCKASGYTFTDHFISWVRQAPGQGLEWMGGLNPYSGGTNYAQKFQGRVTITADESTSTAYMELSSLRSEDTAVYYCARHNWGAYFDYWWGQGTMVTVSSGGGGSGGGGSGGGGSEIVLTQSPATLSLSPGERATLSCRASKSLLHSNGNTYAWYQQKPGQAPRLLIYYMSRATGIPARFSGSGSGTDFTLTISSLEPEDFAVYYCMQGLEDPYTFFGQGTKLEIKREPKSCDKTHTCPPCPAPELLGGPSVFLFPPKPKDTLMISRTPEVTCVVVDVSHEDPEVKFNWYVDGVEVHNAKTKPREEQYNSTYRVVSVLTVLHQDWLNGKEYKCKVSNKALPAPIEKTISKAKGQPREPQVYTLPPSRDELTKNQVSLTCLVKGFYPSDIAVEWESNGQPENNYKTTPPVLDSDGSFFLYSKLTVDKSRWQQGNVFSCSVMHEALHNHYTQKSLSLSPGKKDPKAAATTTPAPRPPTPAPTIASQPLSLRPEACRPAAGGAVHTRGLDFACDIYIWAPLAGTCGVLLLSLVITLYCKRGRKKLLYIFKQPFMRPVQTTQEEDGCSCRFPEEEEGGCELRVKFSRSADAPAYKQGQNQLYNELNLGRREEYDVLDKRRGRDPEMGGKPRRKNPQEGLYNELQKDKMAEAYSEIGMKGERRRGKGHDGLYQGLSTATKDTYDALHMQALPPR

SEQ ID NO: 1314 - protein, 732 aa, Artificial Sequence
  source: /note="Description of Artificial Sequence: Synthetic Chimeric Antigen Receptor sequence"
LLVTSLLLCELPHPAFLLIPDTQVQLQQSGAELVKPGASVKISCKASGYAFSSYWMNWVKQRPGKGLEWIGQIYPGDGDTTYNGKFKGKATLTADKSSSTVYMQLNSLTSEDSAVYFCVRYYYGSSGYFDYWGQGTTLTVSSGGGGSGGGGSGGGGSDVQMIQTPDSLAVSLGQRATISCRASESVDNYGISFMHWYQQKPGQSPKLLIYRASNLESGIPARFSGSGSRTDFTLTINPVETDDVATYYCQQNNKDPPTFGGGTKLEIKRAEPKSCDKTHTCPPCPAPELLGGPSVFLFPPKPKDTLMISRTPEVTCVVVDVSHEDPEVKFNWYVDGVEVHNAKTKPREEQYNSTYRVVSVLTVLHQDWLNGKEYKCKVSNKALPAPIEKTISKAKGQPREPQVYTLPPSRDELTKNQVSLTCLVKGFYPSDIAVEWESNGQPENNYKTTPPVLDSDGSFFLYSKLTVDKSRWQQGNVFSCSVMHEALHNHYTQKSLSLSPGKKDPKAAATTTPAPRPPTPAPTIASQPLSLRPEACRPAAGGAVHTRGLDFACDIYIWAPLAGTCGVLLLSLVITLYCKRGRKKLLYIFKQPFMRPVQTTQEEDGCSCRFPEEEEGGCELRVKFSRSADAPAYKQGQNQLYNELNLGRREEYDVLDKRRGRDPEMGGKPRRKNPQEGLYNELQKDKMAEAYSEIGMKGERRRGKGHDGLYQGLSTATKDTYDALHMQALPPR

SEQ ID NO: 1315 - protein, 732 aa, Artificial Sequence [sequence omitted]

SEQ ID NO: 1316 - protein, 732 aa, Artificial Sequence
  source: /note="Description of Artificial Sequence: Synthetic Chimeric Antigen Receptor sequence"
LLVTSLLLCELPHPAFLLIPDTQVQLQQSGAEVKKPGSSVKVSCKASGYAFSSYISWVRQAPGQGLEWMGGQIYPGDGDTNYAQKFQGRVTITADESTSTAYMELSSLRSEDTAVYYCVRYYYGSSGYFDYWWGQGTMVTVSSGGGGSGGGGSGGGGSEIVLTQSPATLSLSPGERATLSCRASESVDNYGISFAWYQQKPGQAPRLLIYRASRATGIPARFSGSGSGTDFTLTISSLEPEDFAVYYCQQNNKDPPTFFGQGTKLEIKRAEPKSCDKTHTCPPCPAPELLGGPSVFLFPPKPKDTLMISRTPEVTCVVVDVSHEDPEVKFNWYVDGVEVHNAKTKPREEQYNSTYRVVSVLTVLHQDWLNGKEYKCKVSNKALPAPIEKTISKAKGQPREPQVYTLPPSRDELTKNQVSLTCLVKGFYPSDIAVEWESNGQPENNYKTTPPVLDSDGSFFLYSKLTVDKSRWQQGNVFSCSVMHEALHNHYTQKSLSLSPGKKDPKAAATTTPAPRPPTPAPTIASQPLSLRPEACRPAAGGAVHTRGLDFACDIYIWAPLAGTCGVLLLSLVITLYCKRGRKKLLYIFKQPFMRPVQTTQEEDGCSCRFPEEEEGGCELRVKFSRSADAPAYKQGQNQLYNELNLGRREEYDVLDKRRGRDPEMGGKPRRKNPQEGLYNELQKDKMAEAYSEIGMKGERRRGKGHDGLYQGLSTATKDTYDALHMQALPPR

SEQ ID NO: 1317 - protein, 788 aa, Artificial Sequence
  source: /note="Description of Artificial Sequence: Synthetic Chimeric Antigen Receptor sequence"
LLVTSLLLCELPHPAFLLIPDTALQLQQSGAELVRPGASVTLSCKASGYTFTDYEMHWVKQTPVHGLEWIGAIDPETGGTAYNQKFEGKAILTADKSSSTAYMELRSLTSEDSPVYYCARRRYYGSSSFDYWGQGTTLTVSSGGGGSGGGGSGGGGSDVQMIQTPSSLSASLGDRVTISCRASQDIGNYLNWYQQKPDGTVKLLIYYTSRLHSGVPSRFSGSGSGTEYSLTISNLEQEDIATYFCQQGSALPPTFGGGTKLEINRAEPKSCDKTHTCPPCPAPELLGGPSVFLFPPKPKDTLMISRTPEVTCVVVDVSHEDPEVKFNWYVDGVEVHNAKTKPREEQYNSTYRVVSVLTVLHQDWLNGKEYKCKVSNKALPAPIEKTISKAKGQPREPQVYTLPPSRDELTKNQVSLTCLVKGFYPSDIAVEWESNGQPENNYKTTPPVLDSDGSFFLYSKLTVDKSRWQQGNVFSCSVMHEALHNHYTQKSLSLSPGKKDPKAAAFVPVFLPAKPTTTPAPRPPTPAPTIASQPLSLRPEACRPAAGGAVHTRGLDFACDIYIWAPLAGTCGVLLLSLVITLYCNHRNRSKRSRLLHSDYMNMTPRRPGPTRKHYQPYAPPRDFAAYRSRFSVVKRGRKKLLYIFKQPFMRPVQTTQEEDGCSCRFPEEEEGGCELRVKFSRSADAPAYQQGQNQLYNELNLGRREEYDVLDKRRGRDPEMGGKPRRKNPQEGLYNELQKDKMAEAYSEIGMKGERRRGKGHDGLYQGLSTATKDTYDALHMQALPPR

SEQ ID NO: 1318 - protein, 788 aa, Artificial Sequence [sequence omitted]

SEQ ID NO: 1319 - protein, 789 aa, Artificial Sequence [sequence omitted]

SEQ ID NO: 1320 - protein, 790 aa, Artificial Sequence
  source: /note="Description of Artificial Sequence: Synthetic Chimeric Antigen Receptor sequence"
LLVTSLLLCELPHPAFLLIPDTDVKLQESGPGLVAPSQSLSITCTVSGFSLTSYAVSWVRQPPGKGLEWLGIIWSGGATNYNSALKSRLSISKDNSKSQVFLKMNGLQTDDTARYYCAREHYYGSSAMDYWGQGASITVSSGGGGSGGGGSGGGGSGIVMTQSPLSLPVSLGDQASISCRSSQSIVHSYGNTYLFWYLQKPGQSPKLLIYRVSNRFSGVPDRFSGSGSGTNFTLKISRVEAEDMGVYYCFQGTHVPYTFGGGTKLEIKEPKSCDKTHTCPPCPAPELLGGPSVFLFPPKPKDTLMISRTPEVTCVVVDVSHEDPEVKFNWYVDGVEVHNAKTKPREEQYNSTYRVVSVLTVLHQDWLNGKEYKCKVSNKALPAPIEKTISKAKGQPREPQVYTLPPSRDELTKNQVSLTCLVKGFYPSDIAVEWESNGQPENNYKTTPPVLDSDGSFFLYSKLTVDKSRWQQGNVFSCSVMHEALHNHYTQKSLSLSPGKKDPKAAAFVPVFLPAKPTTTPAPRPPTPAPTIASQPLSLRPEACRPAAGGAVHTRGLDFACDIYIWAPLAGTCGVLLLSLVITLYCNHRNRSKRSRLLHSDYMNMTPRRPGPTRKHYQPYAPPRDFAAYRSRFSVVKRGRKKLLYIFKQPFMRPVQTTQEEDGCSCRFPEEEEGGCELRVKFSRSADAPAYQQGQNQLYNELNLGRREEYDVLDKRRGRDPEMGGKPRRKNPQEGLYNELQKDKMAEAYSEIGMKGERRRGKGHDGLYQGLSTATKDTYDALHMQALPPR

SEQ ID NO: 1321 - protein, 790 aa, Artificial Sequence
  source: /note="Description of Artificial Sequence: Synthetic Chimeric Antigen Receptor sequence"
LLVTSLLLCELPHPAFLLIPDTQVQLQQSGAEVKKPGSSVKVSCKASGYTFTDHFISWVRQAPGQGLEWMGGLNPYSGGTNYAQKFQGRVTITADESTSTAYMELSSLRSEDTAVYYCARHNWGAYFDYWWGQGTMVTVSSGGGGSGGGGSGGGGSEIVLTQSPATLSLSPGERATLSCRASKSLLHSNGNTYAWYQQKPGQAPRLLIYYMSRATGIPARFSGSGSGTDFTLTISSLEPEDFAVYYCMQGLEDPYTFFGQGTKLEIKREPKSCDKTHTCPPCPAPELLGGPSVFLFPPKPKDTLMISRTPEVTCVVVDVSHEDPEVKFNWYVDGVEVHNAKTKPREEQYNSTYRVVSVLTVLHQDWLNGKEYKCKVSNKALPAPIEKTISKAKGQPREPQVYTLPPSRDELTKNQVSLTCLVKGFYPSDIAVEWESNGQPENNYKTTPPVLDSDGSFFLYSKLTVDKSRWQQGNVFSCSVMHEALHNHYTQKSLSLSPGKKDPKAAAFVPVFLPAKPTTTPAPRPPTPAPTIASQPLSLRPEACRPAAGGAVHTRGLDFACDIYIWAPLAGTCGVLLLSLVITLYCNHRNRSKRSRLLHSDYMNMTPRRPGPTRKHYQPYAPPRDFAAYRSRFSVVKRGRKKLLYIFKQPFMRPVQTTQEEDGCSCRFPEEEEGGCELRVKFSRSADAPAYQQGQNQLYNELNLGRREEYDVLDKRRGRDPEMGGKPRRKNPQEGLYNELQKDKMAEAYSEIGMKGERRRGKGHDGLYQGLSTATKDTYDALHMQALPPR

SEQ ID NO: 1322 - protein, 792 aa, Artificial Sequence
  source: /note="Description of Artificial Sequence: Synthetic Chimeric Antigen Receptor sequence"
LLVTSLLLCELPHPAFLLIPDTQVQLQQSGAELVKPGASVKISCKASGYAFSSYWMNWVKQRPGKGLEWIGQIYPGDGDTTYNGKFKGKATLTADKSSSTVYMQLNSLTSEDSAVYFCVRYYYGSSGYFDYWGQGTTLTVSSGGGGSGGGGSGGGGSDVQMIQTPDSLAVSLGQRATISCRASESVDNYGISFMHWYQQKPGQSPKLLIYRASNLESGIPARFSGSGSRTDFTLTINPVETDDVATYYCQQNNKDPPTFGGGTKLEIKRAEPKSCDKTHTCPPCPAPELLGGPSVFLFPPKPKDTLMISRTPEVTCVVVDVSHEDPEVKFNWYVDGVEVHNAKTKPREEQYNSTYRVVSVLTVLHQDWLNGKEYKCKVSNKALPAPIEKTISKAKGQPREPQVYTLPPSRDELTKNQVSLTCLVKGFYPSDIAVEWESNGQPENNYKTTPPVLDSDGSFFLYSKLTVDKSRWQQGNVFSCSVMHEALHNHYTQKSLSLSPGKKDPKAAAFVPVFLPAKPTTTPAPRPPTPAPTIASQPLSLRPEACRPAAGGAVHTRGLDFACDIYIWAPLAGTCGVLLLSLVITLYCNHRNRSKRSRLLHSDYMNMTPRRPGPTRKHYQPYAPPRDFAAYRSRFSVVKRGRKKLLYIFKQPFMRPVQTTQEEDGCSCRFPEEEEGGCELRVKFSRSADAPAYQQGQNQLYNELNLGRREEYDVLDKRRGRDPEMGGKPRRKNPQEGLYNELQKDKMAEAYSEIGMKGERRRGKGHDGLYQGLSTATKDTYDALHMQALPPR

SEQ ID NO: 1323 - protein, 792 aa, Artificial Sequence
  source: /note="Description of Artificial Sequence: Synthetic Chimeric Antigen Receptor sequence"
LLVTSLLLCELPHPAFLLIPDTQVQLQQSGAEVKKPGSSVKVSCKASGFSLTSYAISWVRQAPGQGLEWMGGIIWSGGATNYAQKFQGRVTITADESTSTAYMELSSLRSEDTAVYYCAREHYYGSSAMDYWWGQGTMVTVSSGGGGSGGGGSGGGGSEIVLTQSPATLSLSPGERATLSCRASQSIVHSYGNTYAWYQQKPGQAPRLLIYRVSRATGIPARFSGSGSGTDFTLTISSLEPEDFAVYYCFQGTHVPYTFFGQGTKLEIKREPKSCDKTHTCPPCPAPELLGGPSVFLFPPKPKDTLMISRTPEVTCVVVDVSHEDPEVKFNWYVDGVEVHNAKTKPREEQYNSTYRVVSVLTVLHQDWLNGKEYKCKVSNKALPAPIEKTISKAKGQPREPQVYTLPPSRDELTKNQVSLTCLVKGFYPSDIAVEWESNGQPENNYKTTPPVLDSDGSFFLYSKLTVDKSRWQQGNVFSCSVMHEALHNHYTQKSLSLSPGKKDPKAAAFVPVFLPAKPTTTPAPRPPTPAPTIASQPLSLRPEACRPAAGGAVHTRGLDFACDIYIWAPLAGTCGVLLLSLVITLYCNHRNRSKRSRLLHSDYMNMTPRRPGPTRKHYQPYAPPRDFAAYRSRFSVVKRGRKKLLYIFKQPFMRPVQTTQEEDGCSCRFPEEEEGGCELRVKFSRSADAPAYQQGQNQLYNELNLGRREEYDVLDKRRGRDPEMGGKPRRKNPQEGLYNELQKDKMAEAYSEIGMKGERRRGKGHDGLYQGLSTATKDTYDALHMQALPPR

SEQ ID NO: 1324 - protein, 792 aa, Artificial Sequence
  source: /note="Description of Artificial Sequence: Synthetic Chimeric Antigen Receptor sequence"
LLVTSLLLCELPHPAFLLIPDTQVQLQQSGAEVKKPGSSVKVSCKASGYAFSSYISWVRQAPGQGLEWMGGQIYPGDGDTNYAQKFQGRVTITADESTSTAYMELSSLRSEDTAVYYCVRYYYGSSGYFDYWWGQGTMVTVSSGGGGSGGGGSGGGGSEIVLTQSPATLSLSPGERATLSCRASESVDNYGISFAWYQQKPGQAPRLLIYRASRATGIPARFSGSGSGTDFTLTISSLEPEDFAVYYCQQNNKDPPTFFGQGTKLEIKRAEPKSCDKTHTCPPCPAPELLGGPSVFLFPPKPKDTLMISRTPEVTCVVVDVSHEDPEVKFNWYVDGVEVHNAKTKPREEQYNSTYRVVSVLTVLHQDWLNGKEYKCKVSNKALPAPIEKTISKAKGQPREPQVYTLPPSRDELTKNQVSLTCLVKGFYPSDIAVEWESNGQPENNYKTTPPVLDSDGSFFLYSKLTVDKSRWQQGNVFSCSVMHEALHNHYTQKSLSLSPGKKDPKAAAFVPVFLPAKPTTTPAPRPPTPAPTIASQPLSLRPEACRPAAGGAVHTRGLDFACDIYIWAPLAGTCGVLLLSLVITLYCNHRNRSKRSRLLHSDYMNMTPRRPGPTRKHYQPYAPPRDFAAYRSRFSVVKRGRKKLLYIFKQPFMRPVQTTQEEDGCSCRFPEEEEGGCELRVKFSRSADAPAYQQGQNQLYNELNLGRREEYDVLDKRRGRDPEMGGKPRRKNPQEGLYNELQKDKMAEAYSEIGMKGERRRGKGHDGLYQGLSTATKDTYDALHMQALPPR

SEQ ID NO: 1325 - protein, 614 aa, Artificial Sequence
  source: /note="Description of Artificial Sequence: Synthetic Chimeric Antigen Receptor sequence"
METDTLLLWVLLLWVPGSTGSVLHLVPINATSKDDSDVTEVMWQPALRRGRGLQAQGYGVRIQDAGVYLLYSQVLFQDVTFTMGQVVSREGQGRQETLFRCIRSMPSHPDRAYNSCYSAGVFHLHQGDILSVIIPRARAKLNLSPHGTFLGFVKLSGGGSDPAEPKSPDKTHTCPPCPAPPVAGPSVFLFPPKPKDTLMIARTPEVTCVVVDVSHEDPEVKFNWYVDGVEVHNAKTKPREEQYNSTYRVVSVLTVLHQDWLNGKEYKCKVSNKALPAPIEKTISKAKGQPREPQVYTLPPSRDELTKNQVSLTCLVKGFYPSDIAVEWESNGQPENNYKTTPPVLDSDGSFFLYSKLTVDKSRWQQGNVFSCSVMHEALHNHYTQKSLSLSPGKKDPKFWVLVVVGGVLACYSLLVTVAFIIFWVRSKRSRLLHSDYMNMTPRRPGPTRKHYQPYAPPRDFAAYRSRDQRLPPDAHKPPGGGSFRTPIQEEQADAHSTLAKIRVKFSRSADAPAYQQGQNQLYNELNLGRREEYDVLDKRRGRDPEMGGKPRRKNPQEGLYNELQKDKMAEAYSEIGMKGERRRGKGHDGLYQGLSTATKDTYDALHMQALPPR

SEQ ID NO: 1326 - protein, 398 aa, Artificial Sequence
  source: /note="Description of Artificial Sequence: Synthetic Chimeric Antigen Receptor sequence"
METDTLLLWVLLLWVPGSTGSVLHLVPINATSKDDSDVTEVMWQPALRRGRGLQAQGYGVRIQDAGVYLLYSQVLFQDVTFTMGQVVSREGQGRQETLFRCIRSMPSHPDRAYNSCYSAGVFHLHQGDILSVIIPRARAKLNLSPHGTFLGFVKLSGGGSDPAEPKSPDKTHTCPPCPKDPKFWVLVVVGGVLACYSLLVTVAFIIFWVRSKRSRLLHSDYMNMTPRRPGPTRKHYQPYAPPRDFAAYRSRDQRLPPDAHKPPGGGSFRTPIQEEQADAHSTLAKIRVKFSRSADAPAYQQGQNQLYNELNLGRREEYDVLDKRRGRDPEMGGKPRRKNPQEGLYNELQKDKMAEAYSEIGMKGERRRGKGHDGLYQGLSTATKDTYDALHMQALPPR

SEQ ID NO: 1327 - protein, 482 aa, Artificial Sequence; identical to SEQ ID NO: 1273
  source: /note="Description of Artificial Sequence: Synthetic polypeptide"

SEQ ID NO: 1328 - protein, 480 aa, Artificial Sequence
  source: /note="Description of Artificial Sequence: Synthetic polypeptide"
MALPVTALLLPLALLLHAARPEVQLVESGGGLVQPGGSLRLSCAVSGFALSNHGMSWVRRAPGKGLEWVSGIVYSGSTYYAASVKGRFTISRDNSRNTLYLQMNSLRPEDTAIYYCSAHGGESDVWGQGTTVTVSSASGGGGSGGRASGGGGSDIQLTQSPSSLSASVGDRVTITCRASQSISSYLNWYQQKPGKAPKLLIYAASSLQSGVPSRFSGSGSGTDFTLTISSLQPEDFATYYCQQSYSTPYTFGQGTKVEIKTTTPAPRPPTPAPTIASQPLSLRPEACRPAAGGAVHTRGLDFACDIYIWAPLAGTCGVLLLSLVITLYCKRGRKKLLYIFKQPFMRPVQTTQEEDGCSCRFPEEEEGGCELRVKFSRSADAPAYKQGQNQLYNELNLGRREEYDVLDKRRGRDPEMGGKPRRKNPQEGLYNELQKDKMAEAYSEIGMKGERRRGKGHDGLYQGLSTATKDTYDALHMQAL

SEQ ID NO: 1329 - protein, 136 aa, Artificial Sequence
  source: /note="Description of Artificial Sequence: Synthetic Chimeric Antigen Receptor sequence"
CPYSNPSLCSGGGGSELPTQGTFSNVSTNVSPAKPTTTACPYSNPSLCSGGGGSPAPRPPTPAPTIASQPLSLRPEACRPAAGGAVHTRGLDFACDIYIWAPLAGTCGVLLLSLVITLYCNHRNRRRVCKCPRPVV

SEQ ID NO: 1330 - protein, 212 aa, Artificial Sequence
  source: /note="Description of Artificial Sequence: Synthetic Chimeric Antigen Receptor sequence"
MALPVTALLLPLALLLHAARPEVQLVETGGGLVQPGGSLRLSCAASGFTFSSYAMSWVRQAPGKGLEWVSAISGSGGSTYYADSVKGRFTISRDNSKNTLYLQMNTLKAEDTAVYYCARATYKRELRYYYGMDVWGQGTTVTVSSGGGGSGGGGSGGGGSEIVLTQSPSTLSLSPGESATLSCRASQSVSTTFLAWYQQKPGQAPRLLIYGS

SEQ ID NO: 1331 - protein, 391 aa, Artificial Sequence
  source: /note="Description of Artificial Sequence: Synthetic Chimeric Antigen Receptor sequence"
MALPVTALLLPLALLLHAARPGSGSGAQAAQVQLVQSGAEVKKPGASVKVSCKASGYSFPDYYINWVRQAPGQGLEWMGWIYFASGNSEYNQKFTGRVTMTRDTSSSTAYMELSSLRSEDTAVYFCASLYDYDWYFDVWGQGTMVTVSSGGGGSGGGGSGGGGSDIVMTQTPLSLSVTPGEPASISCKSSQSLVHSNGNTYLHWYLQKPGQSPQLLIYKVSNRFSGVPDRFSGSGSGADFTLKISRVEAEDVGVYYCAETSHVPWTFGQGTKLEIKRSDPASGAGSGSGSAIELLPVPGAKKSAKLYIPYIILTIIILTIVGFIWLLKVNGCRKYKLNKTESTPVVEEDEMQPYASYTEKNNPLYDTTNKVKASEALQSEVDTDLHTLSHG

SEQ ID NO: 1332 - protein, 394 aa, Artificial Sequence
  source: /note="Description of Artificial Sequence: Synthetic Chimeric Antigen Receptor sequence"
METDTLLLWVLLLWVPGSTGSVLHLVPINATSKDDSDVTEVMWQPALRRGRGLQAQGYGVRIQDAGVYLLYSQVLFQDVTFTMGQVVSREGQGRQETLFRCIRSMPSHPDRAYNSCYSAGVFHLHQGDILSVIIPRARAKLNLSPHGTFLGFVLSGGGSDPAEPKSPDKTHTCPPCPDPFWVLWVGGVLACYSLLVTVAFIIFWVRSKRSRLLHSDYMNMTPRRPGPTRKHYQPYAPPRDFAAYRSRDQRLPPDAHKPPGGGSFRTPIQEEQADAHSTLAKIRVKFSRSADAPAYQQGQNQLYNELNLGRREEYDVLDKRRGRDPEMGGKPRRKNPQEGLYNELQKDKMAEAYSEIGMKGERRRGKGHDGLYQGLSTATKDTYDALHMQALPPR

SEQ ID NO: 1333 - protein, 416 aa, Artificial Sequence
  source: /note="Description of Artificial Sequence: Synthetic Chimeric Antigen Receptor sequence"
MGTSLLCWMALCLLGADHADGKPIPNPLLGLDSTSGGGGSVLHLVPINATSKDDSDVTEVMWQPALRRGRGLQAQGYGVRIQDAGVYLLYSQVLFQDVTFTMGQVVSREGQGRQETLFRCIRSMPSHPDRAYNSCYSAGVFHLHQGDILSVIIPRARAKLNLSPHGTFLGFVKLSGGGSDPAEPKSPDKTHTCPPCPKDPKFWVLVVVGGVLACYSLLVTVAFIIFVRSKRSRLLHSDYMNMTPRRPGPTRKHYQPYAPPRDFAAYRSRDQRLPPDAHKPPGGGSFRTPIQEEQADAHSTLAKIRVKFSRSADAPAYQQGQNQLYNELNLGRREEYDVLDKRRGRDPEMGGKPRRKNPQEGLYNELQKDKMAEAYSEIGMKGERRRGKGHDGLYQGLSTATKDTYDALHMQALPPR

SEQ ID NO: 1334 - protein, 417 aa, Artificial Sequence
  source: /note="Description of Artificial Sequence: Synthetic Chimeric Antigen Receptor sequence"
MGTSLLCWMALCLLGADHADGKPIPNPLLGLDSTSGGGGSVLHLVPINATSKDDSDVTEVMWQPALRRGRGLQAQGYGVRIQDAGVYLLYSQVLFQDVTFTMGQVVSREGQGRQETLFRCIRSMPSHPDRAYNSCYSAGVFHLHQGDILSVIIPRARAKLNLSPHGTFLGFVKLSGGGSDPAEPKSPDKTHTCPPCPKDPKFWVLVVVGGVLACYSLLVTVAFIIFWVRSKRSRLLHSDYMNMTPRRPGPTRKHYQPYAPPRDFAAYRSRDQRLPPDAHKPPGGGSFRTPIQEEQADAHSTLAKIRVKFSRSADAPAYQQGQNQLYNELNLGRREEYDVLDKRRGRDPEMGGKPRRKNPQEGLYNELQKDKMAEAYSEIGMKGERRRGKGHDGLYQGLSTATKDTYDALHMQALPPR

SEQ ID NO: 1335 - protein, 422 aa, Artificial Sequence
  source: /note="Description of Artificial Sequence: Synthetic Chimeric Antigen Receptor sequence"
METDTLLLWVLLLWVPGSTGSVLHLVPINATSKDDSDVTEVMWQPALRRGRGLQAQGYGVRIQDAGVYLLYSQVLFQDVTFTMGQVVSREGQGRQETLFRCIRSMPSHPDRAYNSCYSAGVFHLHQGDILSVIIPRARAKLNLSPHGTFLGFVKLSGGGSDPTTTPAPRPPTPAPTIASQPLSLRPEACRPAAGGAVHTRGLDFACDIFWVLVVVGGVLACYSLLVTVAFIIFWVRSKRSRLLHSDYMNMTPRRPGPTRKHYQPYAPPRDFAAYRSRDQRLPPDAHKPPGGGSFRTPIQEEQADAHSTLAKIRVKFSRSADAPAYQQGQNQLYNELNLGRREEYDVLDKRRGRDPEMGGKPRRKNPQEGLYNELQKDKAEAYSEIGMKGERRRGKGHDGLYQGLSTATKDYDALHMQALPPR

SEQ ID NO: 1336 - protein, 438 aa, Artificial Sequence
  source: /note="Description of Artificial Sequence: Synthetic Chimeric Antigen Receptor sequence"
MGTSLLCMALCLLGADHADGKPIPNPLLGLDSTSGGGGSVLHLVPINATSKDDSDVTEVMWQPALRRGRGLQAQGYGVRIQDAGVYLLYSQVLFQDVTFTMGQWSREGQGRQETLFRCIRSMPSHPDRAYNSCYSAGVFHLHQGDILSIIPRARAKLNLSPHGTFLGFVKLSGGGSDPTTTPAPRPPTPAPTIASQPLSLRPEACRPAAGGAVHTRGLDFACDIFWVLWVGGVLACYSLLVTVAFIIFWVRSKRSRLLHSDYMNMTPRRPGPTRKHYQPYAPPRDFAAYRSRDQRLPPDAHKPPGGGSFRTPIQEEQADAHSTLAKIRVKFSRSADAPAYQQGQNQLYNELNLGRREEYDVLDKRRGRDPEMGGKPRRKNPQEGLYNELQKDKMAEAYSEIGMKGERRRGKGHDGLYQGLSATKDTYDALHMQALPPR

SEQ ID NO: 1337 - protein, 443 aa, Artificial Sequence
  source: /note="Description of Artificial Sequence: Synthetic Chimeric Antigen Receptor sequence"
MGTSLLCWMALCLLGADHADGKPIPNPLLGLDSTSGGGGSVLHLVPINATSKDDSDVTEVMWQPALRRGRGLQAQGYGVRIQDAGVYLLYSQVLFQDVTFTMGQVVSREGQGRQETLFRCIRSMPSHPDRAYNSCYSAGVFHLHQGDILSVIIPRARAKLNLSPHGTFLGFVKLSGGGSDPTTTPAPRPPTPAPTIASQPLSLRPEACRPAAGGAVHTRGLDFACDIFWVLVVVGGVLACYSLLVTVAFIIFWVRSKRSRLLHSDYMNMTPRRPGPTRKHYQPYAPPRDFAAYRSRDQRLPPDAHKPPGGGSFRTPIQEEQADAHSTLAKIRVKFSRSADAPAYQQGQNQLYNELNLGRREEYDVLDKRRGRDPEMGGKPRRKNPQEGLYNELQKDKMAEAYSEIGMKGERRRGKGHDGLYQGLSTATKDTYDALHMQALPPR

SEQ ID NO: 1338 - protein, 461 aa, Artificial Sequence
  source: /note="Description of Artificial Sequence: Synthetic Chimeric Antigen Receptor sequence"
MALPVTALLLPLALLLHAARPQVQLVQSGAEVKKPGASVKVSCKASGYSFPDYYINWVRQAPGQGLEWMGWIYFASGNSEYNQKFTGRVTMTRDTSINTAYMELSSLTSEDTAVYFCASLYDYDWYFDVWGQGTMVTVSSGGGGSGGGGSGGGGSDIVMTQTPLSLSVTPGQPASISCKSSQSLVHSNGNTYLHWYLQKPGQSPQLLIYKVSNRFSGVPDRFSGSGSGTDFTLKISRVEAEDVGIYYCSQSSIYPWTFGQGTKLEIKGLAVSTISSFFPPGYQIYIWAPLAGTCGVLLLSLVITLYCKRGRKKLLYIFKQPFMRPVQTTQEEDGCSCRFPEEEEGGCELRVKFSRSADAPAYQQGQNQLYNELNLGRREEYDVLDKRRGRDPEMGGKPRRKNPQEGLYNELQKDKMAEAYSEIGMKGERRRGKGHDGLYQGLSTATKDTYDALHMQALPPR

SEQ ID NO: 1339 - protein, 461 aa, Artificial Sequence
  source: /note="Description of Artificial Sequence: Synthetic Chimeric Antigen Receptor sequence"
MALPVTALLLPLALLLHAARPQVQLVQSGAEVKKPGASVKVSCKASGYSFPDYYINWVRQAPGQGLEWMGWIYFASGNSEYNQKFTGRVTMTRDTSSSTAYMELSSLRSEDTAVYFCASLYDYDWYFDVWGQGTMVTVSSGGGGSGGGGSGGGGSDIVMTQTPLSLSVTPGEPASISCKSSQSLVHSNGNTYLHWYLQKPGQSPQLLIYKVSNRFSGVPDRFSGSGSGADFTLKISRVEAEDVGVYYCAETSHVPWTFGQGTKLEIKGLAVSTISSFFPPGYQIYIWAPLAGTCGVLLLSLVITLYCKRGRKKLLYIFKQPFMRPVQTTQEEDGCSCRFPEEEEGGCELRVKFSRSADAPAYQQGQNQLYNELNLGRREEYDVLDKRRGRDPEMGGKPRRKNPQEGLYNELQKDKMAEAYSEIGMKGERRRGKGHDGLYQGLSTATKDTYDALHMQALPPR

SEQ ID NO: 1340 - protein, 464 aa, Artificial Sequence
  source: /note="Description of Artificial Sequence: Synthetic Chimeric Antigen Receptor sequence"
EVQLLESGGGLVQPGGSLRLSCAASGFTFSSYAMNWVRQAPGKGLEWVSAILSSGGSTYYADSVKGRFTISRDNSKNTLYLQMNSLRAEDTAVYYCARYWPMDIWGQGTLVTVSSGGGGSGGGGSGGGGSEIVLTQSPGTLSLSPGERATLSCRGGQSVSSSYLAWYQQKPGQAPRLLMYDASIRATGIPDRFSGSGSGTDFTLTISRLEPEDFAVYYCQQYQSWPLTFGQGTKVEIKAPTTTPAPRPPTPAPTIASQPLSLRPEACRPAAGGAVHTRGLDFACDIYIWAPLAGTCGVLLLSLVITLYCRRGRKKLLYIFKQPFMRPVQTTQEEDGCSCRFPEEEEGGCELRVKFSRSADAPAYQQGQNQLYNELNLGRREEYDVLDKRRGRDPEMGGKPRRKNPQEGLYNELQKDKMAEAYSEIGMKGERRRGKGHDGLYQGLSTATKDTYDALHMQALPPRE

SEQ ID NO: 1341 - protein, 464 aa, Artificial Sequence
  source: /note="Description of Artificial Sequence: Synthetic Chimeric Antigen Receptor sequence"
MALPVTALLLPLALLLHAARPQVQLVQSGAEVKKPGASVKVSCKASGYSFPDYYINWVRQAPGQGLEWMGWIYFASGNSEYNQKFTGRVTMTRDTSINTAYMELSSLTSEDTAVYFCASLYDYDWYFDVWGQGTMVTVSSGGGGSGGGGSGGGGSDIVMTQTPLSLSVTPGQPASISCKSSQSLVHSNGNTYLHWYLQKPGQSPQLLIYKVSNRFSGVPDRFSGSGSGTDFTLKISRVEAEDVGIYYCSQSSIYPWTFGQGTKLEIKGLAVSTISSFFPPGYQIISFFLALTSTALLFLLFFLTLRFSVVKRGRKKLLYIFKQPFMRPVQTTQEEDGCSCRFPEEEEGGCELRVKFSRSADAPAYQQGQNQLYNELNLGRREEYDVLDKRRGRDPEMGGKPRRKNPQEGLYNELQKDKMAEAYSEIGMKGERRRGKGHDGLYQGLSTATKDTYDALHMQALPPR

SEQ ID NO: 1342 - protein, 464 aa, Artificial Sequence
  source: /note="Description of Artificial Sequence: Synthetic Chimeric Antigen Receptor sequence"
MALPVTALLLPLALLLHAARPQVQLVQSGAEVKKPGASVKVSCKASGYSFPDYYINWVRQAPGQGLEWMGWIYFASGNSEYNQKFTGRVTMTRDTSSSTAYMELSSLRSEDTAVYFCASLYDYDWYFDVWGQGTMVTVSSGGGGSGGGGSGGGGSDIVMTQTPLSLSVTPGEPASISCKSSQSLVHSNGNTYLHWYLQKPGQSPQLLIYKVSNRFSGVPDRFSGSGSGADFTLKISRVEAEDVGVYYCAETSHVPWTFGQGTKLEIKGLAVSTISSFFPPGYQIISFFLALTSTALLFLLFFLTLRFSVVKRGRKKLLYIFKQPFMRPVQTTQEEDGCSCRFPEEEEGGCELRVKFSRSADAPAYQQGQNQLYNELNLGRREEYDVLDKRRGRDPEMGGKPRRKNPQEGLYNELQKDKMAEAYSEIGMKGERRRGKGHDGLYQGLSTATKDTYDALHMQALPPR

SEQ ID NO: 1343 - protein, 466 aa, Artificial Sequence
  source: /note="Description of Artificial Sequence: Synthetic Chimeric Antigen Receptor sequence"
EVQLLESGGGLVQPGGSLRLSCAASGFTFSSYAMNWVRQAPGKGLEWVSAILSSGGSTYYADSVKGRFTISRDNSKNTLYLQMNSLRAEDTAVYYCARYWPMDIWGQGTLVTVSSGGSCPYSNPSLCSGGSEIVLTQSPGTLSLSPGERATLSCRGGQSVSSSYLAWYQQKPGQAPRLLMYDASIRATGIPDRFSGSGSGTDFTLTISRLEPEDFAVYYCQQYQSWPLTFGQGTKVEIKSDPTTTPAPRPPTPAPTIASQPLSLRPEACRPAAGGAVHTRGLDFACDIYIWAPLAGTCGVLLLSLVITLYCRRGRKKLLYIFKQPFMRPVQTTQEEDGCSCRFPEEEEGGCELRVKFSRSADAPAYQQGQNQLYNELNLGRREEYDVLDKRRGRDPEMGGKPRRKNPQEGLYNELQKDKMAEAYSEIGMKGERRRGKGHDGLYQGLSTATKDTYDALHMQALPPRE

SEQ ID NO: 1344 - protein, 466 aa, Artificial Sequence
  source: /note="Description of Artificial Sequence: Synthetic Chimeric Antigen Receptor sequence"
QIQLVQSGPELKKPGETVKISCKASGYTFRHYSMNWVKQAPGKGLKWMGRINTESGVPIYADDFKGRFAFSVETSASTAYLVINNLKDEDTASYFCSNDYLYSLDFWGQGTALTVSSGGGGSGGGGSGGGGSDIVLTQSPPSLAMSLGKRATISCRASESVTILGSHLIYWYQQKPGQPPTLLIQLASNVQTGVPARFSGSGSRTDFTLTIDPVEEDDVAVYYCLQSRTIPRTFGGGTKLEIKTTTPAPRPPTPAPTIASQPLSLRPEACRPAAGGAVHTRGLDFACDIYIWAPLAGTCGVLLLSLVITLYCKRGRKKLLYIFKQPFMRPVQTTQEEDGCSCRFPEEEEGGCELRVKFSRSADAPAYKQGQNQLYNELNLGRREEYDVLDKRRGRDPEMGGKPRRKNPQEGLYNELQKDKMAEAYSEIGMKGERRRGKGHDGLYQGLSTATKDTYDALHMQALPPR

SEQ ID NO: 1345 - protein, 466 aa, Artificial Sequence
  source: /note="Description of Artificial Sequence: Synthetic Chimeric Antigen Receptor sequence"
QIQLVQSGPELKKPGETVKISCKASGYTFTHYSMNWVKQAPGKGLKWMGRINTETGEPLYADDFKGRFAFSLETSASTAYLVINNLKNEDTATFFCSNDYLYSCDYWGQGTTLTVSSGGGGSGGGGSGGGGSDIVLTQSPPSLAMSLGKRATISCRASESVTILGSHLIYWYQQKPGQPPTLLIQLASNVQTGVPARFSGSGSRTDFTLTIDPVEEDDVAVYYCLQSRTIPRTFGGGTKLEIKTTTPAPRPPTPAPTIASQPLSLRPEACRPAAGGAVHTRGLDFACDIYIWAPLAGTCGVLLLSLVITLYCKRGRKKLLYIFKQPFMRPVQTTQEEDGCSCRFPEEEEGGCELRVKFSRSADAPAYKQGQNQLYNELNLGRREEYDVLDKRRGRDPEMGGKPRRKNPQEGLYNELQKDKMAEAYSEIGMKGERRRGKGHDGLYQGLSTATKDTYDALHMQALPPR

SEQ ID NO: 1346 - protein, 467 aa, Artificial Sequence
  source: /note="Description of Artificial Sequence: Synthetic Chimeric Antigen Receptor sequence"
QIQLVQSGPDLKKPGETVKLSCKASGYTFTNFGMNWVKQAPGKGFKWMAWINTYTGESYFADDFKGRFAFSVETSATTAYLQINNLKTEDTATYFCARGEIYYGYDGGFAYWGQGTLVTVSAGGGGSGGGGSGGGGSDVVMTQSHRFMSTSVGDRVSITCRASQDVNTAVSWYQQKPGQSPKLLIFSASYRYTGVPDRFTGSGSGADFTLTISSVQAEDLAVYYCQQHYSTPWTFGGGTKLDIKTTTPAPRPPTPAPTIASQPLSLRPEACRPAAGGAVHTRGLDFACDIYIWAPLAGTCGVLLLSLVITLYCKRGRKKLLYIFKQPFMRPVQTTQEEDGCSCRFPEEEEGGCELRVKFSRSADAPAYKQGQNQLYNELNLGRREEYDVLDKRRGRDPEMGGKPRRKNPQEGLYNELQKDKMAEAYSEIGMKGERRRGKGHDGLYQGLSTATKDTYDALHMQALPPR

SEQ ID NO: 1347 - protein, 469 aa, Artificial Sequence
  source: /note="Description of Artificial Sequence: Synthetic Chimeric Antigen Receptor sequence"
QVQLVQSGAEVKKPGASVKVSCKASGYSFPDYYINWVRQAPGQGLEWMGWIYFASGNSEYNQKFTGRVTMTRDTSSSTAYMELSSLRSEDTAVYFCASLYDYDWYFDVWGQGTMVTVSSGGGGSGGGGSGGGGSDIVMTQTPLSLSVTPGEPASISCKSSQSLVHSNGNTYLHWYLQKPGQSPQLLIYKVSNRFSGVPDRFSGSGSGADFTLKISRVEAEDVGVYYCAETSHVPWTFGQGTKLEIKTTTPAPRPPTPAPTIASQPLSLRPEACRPAAGGAVHTRGLDFACDIYIWAPLAGTCGVLLLSLVITLYCKRGRKKLLYIFKQPFMRPVQTTQEEDGCSCRFPEEEEGGCELRVKFSRSADAPAYQQGQNQLYNELNLGRREEYDVLDKRRGRDPEMGGKPRRKNPQEGLYNELQKDKMAEAYSEIGMKGERRRGKGHDGLYQGLSTATKDTYDALHMQALPPR

SEQ ID NO: 1348 - protein, 472 aa, Artificial Sequence
  source: /note="Description of Artificial Sequence: Synthetic Chimeric Antigen Receptor sequence"
EVQLLESGGGLVQPGGSLRLSCAASGFTFSSYAMNWVRQAPGKGLEWVSAILSSGGSTYYADSVKGRFTISRDNSKNTLYLQMNSLRAEDTAVYYCARYWPMDIWGQGTLVTVSSGGGGGSCPYSNPSLCSGGGGGSEIVLTQSPGTLSLSPGERATLSCRGGQSVSSSYLAWYQQKPGQAPRLLMYDASIRATGIPDRFSGSGSGTDFTLTISRLEPEDFAVYYCQQYQSWPLTFGQGTKVEIKSDPTTTPAPRPPTPAPTIASQPLSLRPEACRPAAGGAVHTRGLDFACDIYIWAPLAGTCGVLLLSLVITLYCRRGRKKLLYIFKQPFMRPVQTTQEEDGCSCRFPEEEEGGCELRVKFSRSADAPAYQQGQNQLYNELNLGRREEYDVLDKRRGRDPEMGGKPRRKNPQEGLYNELQKDKMAEAYSEIGMKGERRRGKGHDGLYQGLSTATKDTYDALHMQALPPRE

SEQ ID NO: 1349 - protein, 472 aa, Artificial Sequence
  source: /note="Description of Artificial Sequence: Synthetic Chimeric Antigen Receptor sequence"
QIQLVQSGPELKKPGETVKISCKASGYTFTDYSINWVKRAPGKGLKWMGWINTETREPAYAYDFRGRFAFSLETSASTAYLQINNLKYEDTATYFCALDYSYAMDYWGQGTSVTVSSGGGGSGGGGSGGGGSQIQLVQSGPELKKPGETVKISCKASGYTFTDYSINWVKRAPGKGLKWMGWINTETREPAYAYDFRGRFAFSLETSASTAYLQINNLKYEDTATYFCALDYSYAMDYWGQGTSVTVSSTTTPAPRPPTPAPTIASQPLSLRPEACRPAAGGAVHTRGLDFACDIYIWAPLAGTCGVLLLSLVITLYCKRGRKKLLYIFKQPFMRPVQTTQEEDGCSCRFPEEEEGGCELRVKFSRSADAPAYKQGQNQLYNELNLGRREEYDVLDKRRGRDPEMGGKPRRKNPQEGLYNELQKDKMAEAYSEIGMKGERRRGKGHDGLYQGLSTATKDTYDALHMQALPPR

SEQ ID NO: 1350 - protein, 483 aa, Artificial Sequence
  source: /note="Description of Artificial Sequence: Synthetic Chimeric Antigen Receptor sequence"
MALPVTALLLPLALLLHAARPEVQLVESGGGLVQPGGSLRLSCAVSGFALSNHGMSWVRRAPGKGLEWVSGIVYSGSTYYAASVKGRFTISRDNSRNTLYLQMNSLRPEDTAIYYCSAHGGESDVWGQGTTVTVSSASGGGGSGGRASGGGGSDIQLTQSPSSLSASVGDRVTITCRASQSISSYLNWYQQKPGKAPKLLIYAASSLQSGVPSRFSGSGSGTDFTLTISSLQPEDFATYYCQQSYSTPYTFGQGTKVEIKTTTPAPRPPTPAPTIASQPLSLRPEACRPAAGGAVHTRGLDFACDIYIWAPLAGTCGVLLLSLVITLYCKRGRKKLLYIFKQPFMRPVQTTQEEDGCSCRFPEEEEGGCELRVKFSRSADAPAYKQGQNQLYNELNLGRREEYDVLDKRRGRDPEMGGKPRRKNPQEGLYNELQKDKMAEAYSEIGMKGERRRGKGHDGLYQGLSTATKDTYDALHMQALPPR

SEQ ID NO: 1351 - protein, 483 aa, Artificial Sequence
  source: /note="Description of Artificial Sequence: Synthetic Chimeric Antigen Receptor sequence"
MALPVTALLLPLALLLHAARPEVQLVETGGGLVQPGGSLRLSCAVSGFALSNHGMSWVRRAPGKGLEWVSGIVYSGSTYYAASVKGRFTISRDNSRNTLYLQMNSLRPEDTAIYYCSAHGGESDVWGQGTTVTVSSASGGGGSGGRASGGGGSEIVMTQSPATLSVSPGERATLSCRASQSVSSKLAWYQQKPGQAPRLLMYGASIRATGIPDRFSGSGSGTEFTLTISSLEPEDFAVYYCQQYGSSSWTFGQGTKVEIKTTTPAPRPPTPAPTIASQPLSLRPEACRPAAGGAVHTRGLDFACDIYIWAPLAGTCGVLLLSLVITLYCKRGRKKLLYIFKQPFMRPVQTTQEEDGCSCRFPEEEEGGCELRVKFSRSADAPAYKQGQNQLYNELNLGRREEYDVLDKRRGRDPEMGGKPRRKNPQEGLYNELQKDKMAEAYSEIGMKGERRRGKGHDGLYQGLSTATKDTYDALHMQALPPR

SEQ ID NO: 1352 - protein, 485 aa, Artificial Sequence
  source: /note="Description of Artificial Sequence: Synthetic Chimeric Antigen Receptor sequence"
MALPVTALLLPLALLLHAARPDIVLTQSPASLAVSLGERATINCRASESVSVIGAHLIHWYQQKPGQPPKLLIYLASNLETGVPARFSGSGSGTDFTLTISSLQAEDAAIYYCLQSRIFPRTFGQGTKLEIKGSTSGSGKPGSGEGSTKGQVQLVQSGSELKKPGASVKVSCKASGYTFTDYSINWVRQAPGQGLEWMGWINTETREPAYAYDFRGRFVFSLDTSVSTAYLQISSLKAEDTAVYYCARDYSYAMDYWGQGTLVTVSSAAAQIKESLRAELRVTERRAEVPTAHPSPSPRPAGQFQTLVVGVVGGLLGSLVLLVWVLAVICSKRGRKKLLYIFKQPFMRPVQTTQEEDGCSCRFPEEEEGGCELRVKFSRSADAPAYQQGQNQLYNELNLGRREEYDVLDKRRGRDPEMGGKPRRKNPQEGLYNELQKDKMAEAYSEIGMKGERRRGKGHDGLYQGLSTATKDTYDALHMQALPPR

SEQ ID NO: 1353 - protein, 485 aa, Artificial Sequence
  source: /note="Description of Artificial Sequence: Synthetic Chimeric Antigen Receptor sequence"
MALPVTALLLPLALLLHAARPEVQLVESGGGLVQPGGSLRLSCAASGFTFSSYAMSWVRQAPGKGLEWVSAISGSGGSTYYADSVKGRFTISRDNSKNTLYLQMNSLRAEDTAVYYCAKVVRDGMDVWGQGTTVTVSSGGGGSGGGGSGGGGSEIVLTQSPATLSLSPGERATLSCRASQSVSSSYLAWYQQKPGQAPRLLIYGASSRATGIPDRFSGNGSGTDFTLTISRLEPEDFAVYYCQQYGSPPRFTFGPGTKVDIKTTTPAPRPPTPAPTIASQPLSLRPEACRPAAGGAVHTRGLDFACDIYIWAPLAGTCGVLLLSLVITLYCKRGRKKLLYIFKQPFMRPVQTTQEEDGCSCRFPEEEEGGCELRVKFSRSADAPAYKQGQNQLYNELNLGRREEYDVLDKRRGRDPEMGGKPRRKNPQEGLYNELQKDKMAEAYSEIGMKGERRRGKGHDGLYQGLSTATKDTYDALHMQALPPR

SEQ ID NO: 1354 - protein, 485 aa, Artificial Sequence
  source: /note="Description of Artificial Sequence: Synthetic Chimeric Antigen Receptor sequence"
MALPVTALLLPLALLLHAARPEVQLVETGGGLVQPGGSLRLSCAASGITFSRYPMSWVRQAPGKGLEWVSGISDSGVSTYYADSAKGRFTISRDNSKNTLFLQMSSLRDEDTAVYYCVTRAGSEASDIWGQGTMVTVSSGGGGSGGGGSGGGGSEIVLTQSPATLSLSPGERATLSCRASQSVSNSLAWYQQKPGQAPRLLIYDASSRATGIPDRFSGSGSGTDFTLTISRLEPEDFAIYYCQQFGTSSGLTFGGGTKLEIKTTTPAPRPPTPAPTIASQPLSLRPEACRPAAGGAVHTRGLDFACDIYIWAPLAGTCGVLLLSLVITLYCKRGRKKLLYIFKQPFMRPVQTTQEEDGCSCRFPEEEEGGCELRVKFSRSADAPAYKQGQNQLYNELNLGRREEYDVLDKRRGRDPEMGGKPRRKNPQEGLYNELQKDKMAEAYSEIGMKGERRRGKGHDGLYQGLSTATKDTYDALHMQALPPR

SEQ ID NO: 1355 - protein, 485 aa, Artificial Sequence
  source: /note="Description of Artificial Sequence: Synthetic Chimeric Antigen Receptor sequence"
MALPVTALLLPLALLLHAARPEVQLVETGGGVVQPGGSLRLSCAVSGFALSNHGMSWVRRAPGKGLEWVSGIVYSGSTYYAASVKGRFTISRDNSRNTLYLQMNSLRPEDTAIYYCSAHGGESDVWGQGTTVTVSSASGGGGSGGRASGGGGSEIVLTQSPGTLSLSPGERATLSCRASQSVGSTNLAWYQQKPGQAPRLLIYDASNRATGIPDRFSGGGSGTDFTLTISRLEPEDFAVYYCQQYGSSPPWTFGQGTKVEIKTTTPAPRPPTPAPTIASQPLSLRPEACRPAAGGAVHTRGLDFACDIYIWAPLAGTCGVLLLSLVITLYCKRGRKKLLYIFKQPFMRPVQTTQEEDGCSCRFPEEEEGGCELRVKFSRSADAPAYKQGQNQLYNELNLGRREEYDVLDKRRGRDPEMGGKPRRKNPQEGLYNELQKDKMAEAYSEIGMKGERRRGKGHDGLYQGLSTATKDTYDALHMQALPPR

SEQ ID NO: 1356 - protein, 485 aa, Artificial Sequence
  source: /note="Description of Artificial Sequence: Synthetic Chimeric Antigen Receptor sequence"
MALPVTALLLPLALLLHAARPQVQLVQSGAEVKKPGASVKVSCKPSGYTVTSHYIHWVRRAPGQGLEWMGMINPSGGVTAYSQTLQGRVTMTSDTSSSTVYMELSSLRSEDTAMYYCAREGSGSGWYFDFWGRGTLVTVSSGGGGSGGGGSGGGGSSYVLTQPPSVSVSPGQTASITCSGDGLSKKYVSWYQQKAGQSPVVLISRDKERPSGIPDRFSGSNSADTATLTISGTQAMDEADYYCQAWDDTTVVFGGGTKLTVLTTTPAPRPPTPAPTIASQPLSLRPEACRPAAGGAVHTRGLDFACDIYIWAPLAGTCGVLLLSLVITLYCKRGRKKLLYIFKQPFMRPVQTTQEEDGCSCRFPEEEEGGCELRVKFSRSADAPAYKQGQNQLYNELNLGRREEYDVLDKRRGRDPEMGGKPRRKNPQEGLYNELQKDKMAEAYSEIGMKGERRRGKGHDGLYQGLSTATKDTYDALHMQALPPR

SEQ ID NO: 1357 - protein, 485 aa, Artificial Sequence
  source: /note="Description of Artificial Sequence: Synthetic Chimeric Antigen Receptor sequence"
QVQLVQSGAEVKKPGASVKVSCKASGYSFPDYYINWVRQAPGQGLEWMGWIYFASGNSEYNQKFTGRVTMTRDTSSSTAYMELSSLRSEDTAVYFCASLYDYDWYFDVWGQGTMVTVSSGGGGSGGGGSGGGGSDIVMTQTPLSLSVTPGEPASISCKSSQSLVHSNGNTYLHWYLQKPGQSPQLLIYKVSNRFSGVPDRFSGSGSGADFTLKISRVEAEDVGVYYCAETSHVPWTFGQGTKLEIKGSGGGGSCPYSNPSLCTTTPAPRPPTPAPTIASQPLSLRPEACRPAAGGAVHTRGLDFACDIYIWAPLAGTCGVLLLSLVITLYCKRGRKKLLYIFKQPFMRPVQTTQEEDGCSCRFPEEEEGGCELRVKFSRSADAPAYQQGQNQLYNELNLGRREEYDVLDKRRGRDPEMGGKPRRKNPQEGLYNELQKDKMAEAYSEIGMKGERRRGKGHDGLYQGLSTATKDTYDALHMQALPPR

SEQ ID NO: 1358 - protein, 487 aa, Artificial Sequence
  source: /note="Description of Artificial Sequence: Synthetic Chimeric Antigen Receptor sequence"
MALPVTALLLPLALLLHAARPDIVLTQSPASLAVSLGERATINCRASESVSVIGAHLIHWYQQKPGQPPKLLIYLASNLETGVPARFSGSGSGTDFTLTISSLQAEDAAIYYCLQSRIFPRTFGQGTKLEIKGSTSGSGKPGSGEGSTKGQVQLVQSGSELKKPGASVKVSCKASGYTFTDYSINWVRQAPGQGLEWMGWINTETREPAYAYDFRGRFVFSLDTSVSTAYLQISSLKAEDTAVYYCARDYSYAMDYWGQGTLVTVSSAAADTGLYICKVELMYPPPYYLGIGNGTQIYVIDPEPCPDSDFLLWILAAVSSGLFFYSFLLTAVSKRGRKKLLYIFKQPFMRPVQTTQEEDGCSCRFPEEEEGGCELRVKFSRSADAPAYQQGQNQLYNELNLGRREEYDVLDKRRGRDPEMGGKPRRKNPQEGLYNELQKDKMAEAYSEIGMKGERRRGKGHDGLYQGLSTATKDTYDALHMQALPPR

SEQ ID NO: 1359 - protein, 488 aa, Artificial Sequence
  source: /note="Description of Artificial Sequence: Synthetic Chimeric Antigen Receptor sequence"
MALPVTALLLPLALLLHAARPQVNLRESGPALVKPTQTLTLTCTFSGFSLRTSGMCVSWIRQPPGKALEWLARIDWDEDKFYSTSLKTRLTISKDTSDNQVVLRMTNMDPADTATYYCARSGAGGTSATAFDIWGPGTMVTVSSGGGGSGGGGSGGGGSDIQMTQSPSSLSASVGDRVTITCRASQDIYNNLWFQLKPGSAPRSLMYAANKSQSGVPSRFSGSASGTDFTLTISSLQPEDFATYYCQHYYRFPYSFGQGTKLEIKTTTPAPRPPTPAPTIASQPLSLRPEACRPAAGGAVHTRGLDFACDIYIWAPLAGTCGVLLLSLVITLYCKRGRKKLLYIFKQPFMRPVQTTQEEDGCSCRFPEEEEGGCELRVKFSRSADAPAYKQGQNQLYNELNLGRREEYDVLDKRRGRDPEMGGKPRRKNPQEGLYNELQKDKMAEAYSEIGMKGERRRGKGHDGLYQGLSTATKDTYDALHMQALPPR

SEQ ID NO: 1360 - protein, 488 aa, Artificial Sequence
  source: /note="Description of Artificial Sequence: Synthetic Chimeric Antigen Receptor sequence"
MALPVTALLLPLALLLHAARPQVQLQESGPGLVKPSQTLSLTCTVSGGSISSGGYYWSWIRQHPGKGLEWIGYIYYSGSTYYNPSLKSRVTISVDTSKNQFSLKLSSVTAADTAVYYCARAGIAARLRGAFDIWGQGTMVTVSSGGGGSGGGGSGGGGSDIVMTQSPSSVSASVGDRVIITCRASQGIRNWLWYQQKPGKAPNLLIYAASNLQSGVPSRFSGSGSGADFTLTISSLQPEDVATYYCQKYNSAPFTFGPGTKVDIKTTTPAPRPPTPAPTIASQPLSLRPEACRPAAGGAVHTRGLDFACDIYIWAPLAGTCGVLLLSLVITLYCKRGRKKLLYIFKQPFMRPVQTTQEEDGCSCRFPEEEEGGCELRVKFSRSADAPAYKQGQNQLYNELNLGRREEYDVLDKRRGRDPEMGGKPRRKNPQEGLYNELQKDKMAEAYSEIGMKGERRRGKGHDGLYQGLSTATKDTYDALHMQALPPR

SEQ ID NO: 1361 - protein, 489 aa, Artificial Sequence
  source: /note="Description of Artificial Sequence: Synthetic Chimeric Antigen Receptor sequence"
MALPVTALLLPLALLLHAARPEVQLVESGGGLVQPGGSLRLSCAASGFTFSSYAMSWVRQAPGKGLEWVSAISGSGGSTYYADSVKGRFTISRDNSKNTLYLQMNSLRAEDTAVYYCAKMGWSSGYLGAFDIWGQGTTVTVSSGGGGSGGGGSGGGGSEIVLTQSPGTLSLSPGERATLSCRASQSVASSFLWYQQKPGQAPRLLIYGASGRATGIPDRFSGSGSGTDFTLTISRLEPEDFAVYYCQHYGGSPRLIFGGGTKVDIKTTTPAPRPPTPAPTIASQPLSLRPEACRPAAGGAVHTRGLDFACDIYIWAPLAGTCGVLLLSLVITLYCKRGRKKLLYIFKQPFMRPVQTTQEEDGCSCRFPEEEEGGCELRVKFSRSADAPAYKQGQNQLYNELNLGRREEYDVLDKRRGRDPEMGGKPRRKNPQEGLYNELQKDKMAEAYSEIGMKGERRRGKGHDGLYQGLSTATKDTYDALHMQALPPR

SEQ ID NO: 1362 - protein, 489 aa, Artificial Sequence
  source: /note="Description of Artificial Sequence: Synthetic Chimeric Antigen Receptor sequence"
MALPVTALLLPLALLLHAARPEVQLVESGGGLVQPGRSLRLSCTASGFTFDDYAMHWVRQRPGKGLEWVASINWKGNSLAYGDSVKGRFAISRDNAKNTVFLQMNSLRTEDTAVYYCASHQGVAYYNYAMDVWGRGTLVTVSSGGGGSGGGGSGGGGSEIVLTQSPGTLSLSPGERATLSCRATQSIGSSFLWYQQRPGQAPRLLIYGASQRATGIPDRFSGRGSGTDFTLTISRVEPEDSAVYYCQHYESSPSWIFGQGTKVEIKTTTPAPRPPTPAPTIASQPLSLRPEACRPAAGGAVHTRGLDFACDIYIWAPLAGTCGVLLLSLVITLYCKRGRKKLLYIFKQPFMRPVQTTQEEDGCSCRFPEEEEGGCELRVKFSRSADAPAYKQGQNQLYNELNLGRREEYDVLDKRRGRDPEMGGKPRRKNPQEGLYNELQKDKMAEAYSEIGMKGERRRGKGHDGLYQGLSTATKDTYDALHMQALPPR

SEQ ID NO: 1363 - protein, 489 aa, Artificial Sequence
  source: /note="Description of Artificial Sequence: Synthetic Chimeric Antigen Receptor sequence"
MALPVTALLLPLALLLHAARPQVQLQESGGGLVQPGGSLRLSCAASGFTFSSDAMTWVRQAPGKGLEWVSVISGSGGTTYYADSVKGRFTISRDNSKNTLYLQMNSLRAEDTAVYYCAKLDSSGYYYARGPRYWGQGTLVTVSSASGGGGSGGRASGGGGSDIQLTQSPSSLSASVGDRVTITCRASQSISSYLNWYQQKPGKAPKLLIYGASTLASGVPARFSGSGSGTHFTLTINSLQSEDSATYYCQQSYKRAFGQGTKVEIKTTTPAPRPPTPAPTIASQPLSLRPEACRPAAGGAVHTRGLDFACDIYIWAPLAGTCGVLLLSLVITLYCKRGRKKLLYIFKQPFMRPVQTTQEEDGCSCRFPEEEEGGCELRVKFSRSADAPAYKQGQNQLYNELNLGRREEYDVLDKRRGRDPEMGGKPRRKNPQEGLYNELQKDKMAEAYSEIGMKGERRRGKGHDGLYQGLSTATKDTYDALHMQALPPR

SEQ ID NO: 1364 - protein, 489 aa, Artificial Sequence
  source: /note="Description of Artificial Sequence: Synthetic Chimeric Antigen Receptor sequence"
MALPVTALLLPLALLLHAARPQVQLVESGGGLVQPGRSLRLSCAASGFTFSNYAMSWVRQAPGKGLGWVSGISRSGENTYYADSVKGRFTISRDNSKNTLYLQMNSLRDEDTAVYYCARSPAHYYGGMDVWGQGTTVTVSSASGGGGSGGRASGGGGSDIVLTQSPGTLSLSPGERATLSCRASQSISSSFLWYQQKPGQAPRLLIYGASRRATGIPDRFSGSGSGTDFTLTISRLEPEDSAVYYCQQYHSSPSWIFGQGTKLEIKTTTPAPRPPTPAPTIASQPLSLRPEACRPAAGGAVHTRGLDFACDIYIWAPLAGTCGVLLLSLVITLYCKRGRKKLLYIFKQPFMRPVQTTQEEDGCSCRFPEEEEGGCELRVKFSRSADAPAYKQGQNQLYNELNLGRREEYDVLDKRRGRDPEMGGKPRRKNPQEGLYNELQKDKMAEAYSEIGMKGERRRGKGHDGLYQGLSTATKDTYDALHMQALPPR

SEQ ID NO: 1365 - protein, 490 aa, Artificial Sequence
  source: /note="Description of Artificial Sequence: Synthetic Chimeric Antigen Receptor sequence"
EVQLLESGGGLVQPGGSLRLSCAASGFTFSSYAMNWVRQAPGKGLEWVSAILSSGGSTYYADSVKGRFTISRDNSKNTLYLQMNSLRAEDTAVYYCARYWPMDIWGQGTLVTVSSGGSCPYSNPSLCSGGSEIVLTQSPGTLSLSPGERATLSCRGGQSVSSSYLAWYQQKPGQAPRLLMYDASIRATGIPDRFSGSGSGTDFTLTISRLEPEDFAVYYCQQYQSWPLTFGQGTKVEIKSDPGSGGGGSCPYSNPSLCSGGGGSAPTTTPAPRPPTPAPTIASQPLSLRPEACRPAAGGAVHTRGLDFACDIYIWAPLAGTCGVLLLSLVITLYCRRGRKKLLYIFKQPFMRPVQTTQEEDGCSCRFPEEEEGGCELRVKFSRSADAPAYQQGQNQLYNELNLGRREEYDVLDKRRGRDPEMGGKPRRKNPQEGLYNELQKDKMAEAYSEIGMKGERRRGKGHDGLYQGLSTATKDTYDALHMQALPPRE

SEQ ID NO: 1366 - protein, 490 aa, Artificial Sequence
  source: /note="Description of Artificial Sequence: Synthetic Chimeric Antigen Receptor sequence"
MALPVTALLLPLALLLHAARPEVQLVESGGGLVKPGGSLRLSCAASGFTFSSYSMNWVRQAPGKGLEWVSSISSSSSYIYYADSVKGRFTISRDNAKNSLYLQMNSLRAEDTAVYYCAKTIAAVYAFDIWGQGTTVTVSSGGGGSGGGGSGGGGSEIVLTQSPLSLPVTPEEPASISCRSSQSLLHSNGYNYLDWYLQKPGQSPQLLIYLGSNRASGVPDRFSGSGSGTDFTLKISRVEAEDVGVYYCMQALQTPYIFGQGTKLEIKTTTPAPRPPTPAPTIASQPLSLRPEACRPAAGGAVHTRGLDFACDIYIWAPLAGTCGVLLLSLVITLYCKRGRKKLLYIFKQPFMRPVQTTQEEDGCSCRFPEEEEGGCELRVKFSRSADAPAYKQGQNQLYNELNLGRREEYDVLDKRRGRDPEMGGKPRRKNPQEGLYNELQKDKMAEAYSEIGMKGERRRGKGHDGLYQGLSTATKDTYDALHMQALPPR

SEQ ID NO: 1367 - protein, 490 aa, Artificial Sequence
  source: /note="Description of Artificial Sequence: Synthetic Chimeric Antigen Receptor sequence"
MALPVTALLLPLALLLHAARPEVQLVESGGGLVQPGGSLRLSCAASGFTFSSYAMSWVRQAPGKGLEWVSAISGSGGSTYYADSVKGRFTISRDNSKNTLYLQMNSLRAEDTAVYYCAKVEGSGSLDYWGQGTLVTVSSGGGGSGGGGSGGGGSEIVMTQSPGTLSLSPGERATLSCRASQSVSSAYLAWYQQKPGQPPRLLISGASTRATGIPDRFGGSGSGTDFTLTISRLEPEDFAVYYCQHYGSSFNGSSLFIFGQGTRLEIKTTTPAPRPPTPAPTIASQPLSLRPEACRPAAGGAVHTRGLDFACDIYIWAPLAGTCGVLLLSLVITLYCKRGRKKLLYIFKQPFMRPVQTTQEEDGCSCRFPEEEEGGCELRVKFSRSADAPAYKQGQNQLYNELNLGRREEYDVLDKRRGRDPEMGGKPRRKNPQEGLYNELQKDKMAEAYSEIGMKGERRRGKGHDGLYQGLSTATKDTYDALHMQALPPR

SEQ ID NO: 1368 - protein, 490 aa, Artificial Sequence
  source: /note="Description of Artificial Sequence: Synthetic Chimeric Antigen Receptor sequence"
MALPVTALLLPLALLLHAARPQVQLVQSGAEVKKPGASVKVSCKASGYSFPDYYINWVRQAPGQGLEWMGWIYFASGNSEYNQKFTGRVTMTRDTSINTAYMELSSLTSEDTAVYFCASLYDYDWYFDVWGQGTMVTVSSGGGGSGGGGSGGGGSDIVMTQTPLSLSVTPGQPASISCKSSQSLVHSNGNTYLHWYLQKPGQSPQLLIYKVSNRFSGVPDRFSGSGSGTDFTLKISRVEAEDVGIYYCSQSSIYPWTFGQGTKLEIKTTTPAPRPPTPAPTIASQPLSLRPEACRPAAGGAVHTRGLDFACDIYIWAPLAGTCGVLLLSLVITLYCKRGRKKLLYIFKQPFMRPVQTTQEEDGCSCRFPEEEEGGCELRVKFSRSADAPAYQQGQNQLYNELNLGRREEYDVLDKRRGRDPEMGGKPRRKNPQEGLYNELQKDKMAEAYSEIGMKGERRRGKGHDGLYQGLSTATKDTYDALHMQALPPR

SEQ ID NO: 1369 - protein, 490 aa, Artificial Sequence
  source: /note="Description of Artificial Sequence: Synthetic Chimeric Antigen Receptor sequence"
MALPVTALLLPLALLLHAARPQVQLVQSGAEVKKPGASVKVSCKASGYSFPDYYINWVRQAPGQGLEWMGWIYFASGNSEYNQKFTGRVTMTRDTSSSTAYMELSSLRSEDTAVYFCASLYDYDWYFDVWGQGTMVTVSSGGGGSGGGGSGGGGSDIVMTQTPLSLSVTPGEPASISCKSSQSLVHSNGNTYLHWYLQKPGQSPQLLIYKVSNRFSGVPDRFSGSGSGADFTLKISRVEAEDVGVYYCAETSHVPWTFGQGTKLEIKTTTPAPRPPTPAPTIASQPLSLRPEACRPAAGGAVHTRGLDFACDIYIWAPLAGTCGVLLLSLVITLYCKRGRKKLLYIFKQPFMRPVQTTQEEDGCSCRFPEEEEGGCELRVKFSRSADAPAYQQGQNQLYNELNLGRREEYDVLDKRRGRDPEMGGKPRRKNPQEGLYNELQKDKMAEAYSEIGMKGERRRGKGHDGLYQGLSTATKDTYDALHMQALPPR

SEQ ID NO: 1370 - protein, 490 aa, Artificial Sequence
  source: /note="Description of Artificial Sequence: Synthetic Chimeric Antigen Receptor sequence"
MALPVTALLLPLALLLHAARPQVQLVQSGGGLVKPGGSLRLSCAASGFTFSDYYMSWIRQAPGKGLEWVSYISSSGNTIYYADSVKGRFTISRDNAKNSLYLQMNSLRAEDTAVYYCARSTMVREDYWGQGTLVTVSSASGGGGSGGRASGGGGSDIVLTQSPLSLPVTLGQPASISCKSSESLVHNSGKTYLNWFHQRPGQSPRRLIYEVSNRDSGVPDRFTGSGSGTDFTLKISRVEAEDVGVYYCMQGTHWPGIFGQGTKLEIKTTTPAPRPPTPAPTIASQPLSLRPEACRPAAGGAVHTRGLDFACDIYIWAPLAGTCGVLLLSLVITLYCKRGRKKLLYIFKQPFMRPVQTTQEEDGCSCRFPEEEEGGCELRVKFSRSADAPAYKQGQNQLYNELNLGRREEYDVLDKRRGRDPEMGGKPRRKNPQEGLYNELQKDKMAEAYSEIGMKGERRRGKGHDGLYQGLSTATKDTYDALHMQALPPR

SEQ ID NO: 1371 - protein, 491 aa, Artificial Sequence
  source: /note="Description of Artificial Sequence: Synthetic Chimeric Antigen Receptor sequence"
GGGGSCPYSNPSLCSGGGGSGGGGSEVQLLESGGGLVQPGGSLRLSCAASGFTFSSYAMNWVRQAPGKGLEWVSAILSSGGSTYYADSVKGRFTISRDNSKNTLYLQMNSLRAEDTAVYYCARYWPMDIWGQGTLVTVSSGGSCPYSNPSLCSGGSEIVLTQSPGTLSLSPGERATLSCRGGQSVSSSYLAWYQQKPGQAPRLLMYDASIRATGIPDRFSGSGSGTDFTLTISRLEPEDFAVYYCQQYQSWPLTFGQGTKVEIKSDPTTTPAPRPPTPAPTIASQPLSLRPEACRPAAGGAVHTRGLDFACDIYIWAPLAGTCGVLLLSLVITLYCRRGRKKLLYIFKQPFMRPVQTTQEEDGCSCRFPEEEEGGCELRVKFSRSADAPAYQQGQNQLYNELNLGRREEYDVLDKRRGRDPEMGGKPRRKNPQEGLYNELQKDKMAEAYSEIGMKGERRRGKGHDGLYQGLSTATKDTYDALHMQALPPRE

SEQ ID NO: 1372 - protein, 491 aa, Artificial Sequence
  source: /note="Description of Artificial Sequence: Synthetic Chimeric Antigen Receptor sequence"
QVQLVQSGAEVKKPGASVKVSCKASGYSFPDYYINWVRQAPGQGLEWMGWIYFASGNSEYNQKFTGRVTMTRDTSSSTAYMELSSLRSEDTAVYFCASLYDYDWYFDVWGQGTMVTVSSGGGGSGGGGSGGGGSDIVMTQTPLSLSVTPGEPASISCKSSQSLVHSNGNTYLHWYLQKPGQSPQLLIYKVSNRFSGVPDRFSGSGSGADFTLKISRVEAEDVGVYYCAETSHVPWTFGQGTKLEIKGSGGGGSCPYSNPSLCSGGGGSTTTPAPRPPTPAPTIASQPLSLRPEACRPAAGGAVHTRGLDFACDIYIWAPLAGTCGVLLLSLVITLYCKRGRKKLLYIFKQPFMRPVQTTQEEDGCSCRFPEEEEGGCELRVKFSRSADAPAYQQGQNQLYNELNLGRREEYDVLDKRRGRDPEMGGKPRRKNPQEGLYNELQKDKMAEAYSEIGMKGERRRGKGHDGLYQGLSTATKDTYDALHMQALPPR

SEQ ID NO: 1373 - protein, 492 aa, Artificial Sequence
  source: /note="Description of Artificial Sequence: Synthetic Chimeric Antigen Receptor sequence"
MALPVTALLLPLALLLHAARPEVQLVETGGGLVQPGGSLRLSCAASGFTFSSYAMSWVRQAPGKGLEWVSAISGSGGSTYYADSVKGRFTISRDNSKNTLYLQMNTLKAEDTAVYYCARATYKRELRYYYGMDVWGQGTTVTVSSGGGGSGGGGSGGGGSEIVLTQSPSTLSLSPGESATLSCRASQSVSTTFLAWYQQKPGQAPRLLIYGSSNRATGIPDRFSGSGSGTDFTLTIRRLEPEDFAVYYCQQYHSSPSWTFGQGTKVEIKTTTPAPRPPTPAPTIASQPLSLRPEACRPAAGGAVHTRGLDFACDIYIWAPLAGTCGVLLLSLVITLYCKRGRKKLLYIFKQPFMRPVQTTQEEDGCSCRFPEEEEGGCELRVKFSRSADAPAYKQGQNQLYNELNLGRREEYDVLDKRRGRDPEMGGKPRRKNPQEGLYNELQKDKMAEAYSEIGMKGERRRGKGHDGLYQGLSTATKDTYDALHMQALPPR

SEQ ID NO: 1374 - protein, 492 aa, Artificial Sequence
  source: /note="Description of Artificial Sequence: Synthetic Chimeric Antigen Receptor sequence"
MALPVTALLLPLALLLHAARPEVQLVETGGGLVQPGGSLRLSCAASGFTFSSYAMSWVRQAPGKGLEWVSAISGSGGSTYYADSVKGRFTMSRENDKNSVFLQMNSLRVEDTGVYYCARANYKRELRYYYGMDVWGQGTMVTVSSGGGGSGGGGSGGGGSEIVMTQSPGTLSLSPGESATLSCRASQRVASNYLAWYQHKPGQAPSLLISGASSRATGVPDRFSGSGSGTDFTLAISRLEPEDSAVYYCQHYDSSPSWTFGQGTKVEIKTTTPAPRPPTPAPTIASQPLSLRPEACRPAAGGAVHTRGLDFACDIYIWAPLAGTCGVLLLSLVITLYCKRGRKKLLYIFKQPFMRPVQTTQEEDGCSCRFPEEEEGGCELRVKFSRSADAPAYKQGQNQLYNELNLGRREEYDVLDKRRGRDPEMGGKPRRKNPQEGLYNELQKDKMAEAYSEIGMKGERRRGKGHDGLYQGLSTATKDTYDALHMQALPPR

SEQ ID NO: 1375 - protein, 493 aa, Artificial Sequence
  source: /note="Description of Artificial Sequence: Synthetic Chimeric Antigen Receptor sequence"
MALPVTALLLPLALLLHAARPDIVLTQSPASLAMSLGERATISCRASESVSVIGAHLIHWYQQKPGQPPKLLIYLASNLETGVPARFSGSGSGTDFTLTISRVQAEDAAIYSCLQSRIFPRTFGQGTKLEIKGSTSGSGKPGSGEGSTKGQIQLVQSGSELKKPGESVKISCKASGYTFTDYSINWVKQAPGQGLKWMGWINTETREPAYAYDFRGRFVFSLDTSASTAYLQISSLKAEDTAVYFCALDYSYAMDYWGQGTLVTVSSAAATTTPAPRPPTPAPTIASQPLSLRPEACRPAAGGAVHTRGLDFACDIYIWAPLAGTCGVLLLSLVITLYCKRGRKKLLYIFKQPFMRPVQTTQEEDGCSCRFPEEEEGGCELRVKFSRSADAPAYQQGQNQLYNELNLGRREEYDVLDKRRGRDPEMGGKPRRKNPQEGLYNELQKDKMAEAYSEIGMKGERRRGKGHDGLYQGLSTATKDTYDALHMQALPPR

SEQ ID NO: 1376 - protein, 493 aa, Artificial Sequence
  source: /note="Description of Artificial Sequence: Synthetic Chimeric Antigen Receptor sequence"
MALPVTALLLPLALLLHAARPDIVLTQSPASLAMSLGERATISCRASESVSVIGAHLIHWYQQKPGQPPKLLIYLASNLETGVPARFSGSGSGTDFTLTISRVQAEDAAIYSCLQSRIFPRTFGQGTKLEIKGSTSGSGKPGSGEGSTKGQVQLVQSGSELKKPGASVKVSCKASGYTFTDYSINWVRQAPGQGLEWMGWINTETREPAYAYDFRGRFVFSLDTSVSTAYLQISSLKAEDTAVYYCARDYSYAMDYWGQGTLVTVSSAAATTTPAPRPPTPAPTIASQPLSLRPEACRPAAGGAVHTRGLDFACDIYIWAPLAGTCGVLLLSLVITLYCKRGRKKLLYIFKQPFMRPVQTTQEEDGCSCRFPEEEEGGCELRVKFSRSADAPAYQQGQNQLYNELNLGRREEYDVLDKRRGRDPEMGGKPRRKNPQEGLYNELQKDKMAEAYSEIGMKGERRRGKGHDGLYQGLSTATKDTYDALHMQALPPR

SEQ ID NO: 1377 - protein, 493 aa, Artificial Sequence
  source: /note="Description of Artificial Sequence: Synthetic Chimeric Antigen Receptor sequence"
MALPVTALLLPLALLLHAARPDIVLTQSPASLAMSLGERATISCRASESVSVIGAHLIHWYQQKPGQPPKLLIYLASNLETGVPARFSGSGSGTDFTLTISRVQAEDAAIYSCLQSRIFPRTFGQGTKLEIKGSTSGSGKPGSGEGSTKGQVQLVQSGSELKKPGESVKISCKASGYTFTDYSINWVKQAPGQGLKWMGWINTETREPAYAYDFRGRFVFSLDTSASTAYLQISSLKAEDTAVYFCALDYSYAMDYWGQGTLVTVSSAAATTTPAPRPPTPAPTIASQPLSLRPEACRPAAGGAVHTRGLDFACDIYIWAPLAGTCGVLLLSLVITLYCKRGRKKLLYIFKQPFMRPVQTTQEEDGCSCRFPEEEEGGCELRVKFSRSADAPAYQQGQNQLYNELNLGRREEYDVLDKRRGRDPEMGGKPRRKNPQEGLYNELQKDKMAEAYSEIGMKGERRRGKGHDGLYQGLSTATKDTYDALHMQALPPR

SEQ ID NO: 1378 - protein, 493 aa, Artificial Sequence
  source: /note="Description of Artificial Sequence: Synthetic Chimeric Antigen Receptor sequence"
MALPVTALLLPLALLLHAARPDIVLTQSPASLAMSLGERATISCRASESVSVIGAHLIHWYQQKPGQPPKLLIYLASNLETGVPARFSGSGSGTDFTLTISRVQAEDAAIYSCLQSRIFPRTFGQGTKLEIKGSTSGSGKPGSGEGSTKGQVQLVQSGSELKKPGESVKISCKASGYTFTDYSINWVRQAPGQGLEWMGWINTETREPAYAYDFRGRFVFSLDTSASTAYLQISSLKAEDTAVYFCALDYSYAMDYWGQGTLVTVSSAAATTTPAPRPPTPAPTIASQPLSLRPEACRPAAGGAVHTRGLDFACDIYIWAPLAGTCGVLLLSLVITLYCKRGRKKLLYIFKQPFMRPVQTTQEEDGCSCRFPEEEEGGCELRVKFSRSADAPAYQQGQNQLYNELNLGRREEYDVLDKRRGRDPEMGGKPRRKNPQEGLYNELQKDKMAEAYSEIGMKGERRRGKGHDGLYQGLSTATKDTYDALHMQALPPR

SEQ ID NO: 1379 - protein, 493 aa, Artificial Sequence
  source: /note="Description of Artificial Sequence: Synthetic Chimeric Antigen Receptor sequence"
MALPVTALLLPLALLLHAARPDIVLTQSPASLAMSLGERATISCRASESVSVIGAHLIHWYQQKPGQPPKLLIYLASNLETGVPARFSGSGSGTDFTLTISRVQAEDAAIYSCLQSRIFPRTFGQGTKLEIKGSTSGSGKPGSGEGSTKGQVQLVQSGSELKKPGESVKVSCKASGYTFTDYSINWVRQAPGQGLEWMGWINTETREPAYAYDFRGRFVFSLDTSVSTAYLQISSLKAEDTAVYYCALDYSYAMDYWGQGTLVTVSSAAATTTPAPRPPTPAPTIASQPLSLRPEACRPAAGGAVHTRGLDFACDIYIWAPLAGTCGVLLLSLVITLYCKRGRKKLLYIFKQPFMRPVQTTQEEDGCSCRFPEEEEGGCELRVKFSRSADAPAYQQGQNQLYNELNLGRREEYDVLDKRRGRDPEMGGKPRRKNPQEGLYNELQKDKMAEAYSEIGMKGERRRGKGHDGLYQGLSTATKDTYDALHMQALPPR

SEQ ID NO: 1380 - protein, 493 aa, Artificial Sequence
  source: /note="Description of Artificial Sequence: Synthetic Chimeric Antigen Receptor sequence"
MALPVTALLLPLALLLHAARPDIVLTQSPASLAVSLGERATINCRASESVSVIGAHLIHWYQQKPGQPPKLLIYLASNLETGVPARFSGSGSGTDFTLTISSLQAEDAAIYSCLQSRIFPRTFGQGTKLEIKGSTSGSGKPGSGEGSTKGQIQLVQSGSELKKPGESVKISCKASGYTFTDYSINWVKQAPGQGLKWMGWINTETREPAYAYDFRGRFVFSLDTSASTAYLQISSLKAEDTAVYFCALDYSYAMDYWGQGTLVTVSSAAATTTPAPRPPTPAPTIASQPLSLRPEACRPAAGGAVHTRGLDFACDIYIWAPLAGTCGVLLLSLVITLYCKRGRKKLLYIFKQPFMRPVQTTQEEDGCSCRFPEEEEGGCELRVKFSRSADAPAYQQGQNQLYNELNLGRREEYDVLDKRRGRDPEMGGKPRRKNPQEGLYNELQKDKMAEAYSEIGMKGERRRGKGHDGLYQGLSTATKDTYDALHMQALPPR

SEQ ID NO: 1381 - protein, 493 aa, Artificial Sequence
  source: /note="Description of Artificial Sequence: Synthetic Chimeric Antigen Receptor sequence"
MALPVTALLLPLALLLHAARPDIVLTQSPASLAVSLGERATINCRASESVSVIGAHLIHWYQQKPGQPPKLLIYLASNLETGVPARFSGSGSGTDFTLTISSLQAEDAAIYSCLQSRIFPRTFGQGTKLEIKGSTSGSGKPGSGEGSTKGQVQLVQSGSELKKPGASVKVSCKASGYTFTDYSINWVRQAPGQGLEWMGWINTETREPAYAYDFRGRFVFSLDTSVSTAYLQISSLKAEDTAVYYCARDYSYAMDYWGQGTLVTVSSAAATTTPAPRPPTPAPTIASQPLSLRPEACRPAAGGAVHTRGLDFACDIYIWAPLAGTCGVLLLSLVITLYCKRGRKKLLYIFKQPFMRPVQTTQEEDGCSCRFPEEEEGGCELRVKFSRSADAPAYQQGQNQLYNELNLGRREEYDVLDKRRGRDPEMGGKPRRKNPQEGLYNELQKDKMAEAYSEIGMKGERRRGKGHDGLYQGLSTATKDTYDALHMQALPPR

SEQ ID NO: 1382 - protein, 493 aa, Artificial Sequence
  source: /note="Description of Artificial Sequence: Synthetic Chimeric Antigen Receptor sequence"
MALPVTALLLPLALLLHAARPDIVLTQSPASLAVSLGERATINCRASESVSVIGAHLIHWYQQKPGQPPKLLIYLASNLETGVPARFSGSGSGTDFTLTISSLQAEDAAIYSCLQSRIFPRTFGQGTKLEIKGSTSGSGKPGSGEGSTKGQVQLVQSGSELKKPGESVKISCKASGYTFTDYSINWVKQAPGQGLKWMGWINTETREPAYAYDFRGRFVFSLDTSASTAYLQISSLKAEDTAVYFCALDYSYAMDYWGQGTLVTVSSAAATTTPAPRPPTPAPTIASQPLSLRPEACRPAAGGAVHTRGLDFACDIYIWAPLAGTCGVLLLSLVITLYCKRGRKKLLYIFKQPFMRPVQTTQEEDGCSCRFPEEEEGGCELRVKFSRSADAPAYQQGQNQLYNELNLGRREEYDVLDKRRGRDPEMGGKPRRKNPQEGLYNELQKDKMAEAYSEIGMKGERRRGKGHDGLYQGLSTATKDTYDALHMQALPPR

SEQ ID NO: 1383 - protein, 493 aa, Artificial Sequence
  source: /note="Description of Artificial Sequence: Synthetic Chimeric Antigen Receptor sequence"
MALPVTALLLPLALLLHAARPDIVLTQSPASLAVSLGERATINCRASESVSVIGAHLIHWYQQKPGQPPKLLIYLASNLETGVPARFSGSGSGTDFTLTISSLQAEDAAIYSCLQSRIFPRTFGQGTKLEIKGSTSGSGKPGSGEGSTKGQVQLVQSGSELKKPGESVKISCKASGYTFTDYSINWVRQAPGQGLEWMGWINTETREPAYAYDFRGRFVFSLDTSASTAYLQISSLKAEDTAVYFCALDYSYAMDYWGQGTLVTVSSAAATTTPAPRPPTPAPTIASQPLSLRPEACRPAAGGAVHTRGLDFACDIYIWAPLAGTCGVLLLSLVITLYCKRGRKKLLYIFKQPFMRPVQTTQEEDGCSCRFPEEEEGGCELRVKFSRSADAPAYQQGQNQLYNELNLGRREEYDVLDKRRGRDPEMGGKPRRKNPQEGLYNELQKDKMAEAYSEIGMKGERRRGKGHDGLYQGLSTATKDTYDALHMQALPPR

SEQ ID NO: 1384 - protein, 493 aa, Artificial Sequence
  source: /note="Description of Artificial Sequence: Synthetic Chimeric Antigen Receptor sequence"
MALPVTALLLPLALLLHAARPDIVLTQSPASLAVSLGERATINCRASESVSVIGAHLIHWYQQKPGQPPKLLIYLASNLETGVPARFSGSGSGTDFTLTISSLQAEDAAIYSCLQSRIFPRTFGQGTKLEIKGSTSGSGKPGSGEGSTKGQVQLVQSGSELKKPGESVKVSCKASGYTFTDYSINWVRQAPGQGLEWMGWINTETREPAYAYDFRGRFVFSLDTSVSTAYLQISSLKAEDTAVYYCALDYSYAMDYWGQGTLVTVSSAAATTTPAPRPPTPAPTIASQPLSLRPEACRPAAGGAVHTRGLDFACDIYIWAPLAGTCGVLLLSLVITLYCKRGRKKLLYIFKQPFMRPVQTTQEEDGCSCRFPEEEEGGCELRVKFSRSADAPAYQQGQNQLYNELNLGRREEYDVLDKRRGRDPEMGGKPRRKNPQEGLYNELQKDKMAEAYSEIGMKGERRRGKGHDGLYQGLSTATKDTYDALHMQALPPR

SEQ ID NO: 1385 - protein, 493 aa, Artificial Sequence
  source: /note="Description of Artificial Sequence: Synthetic Chimeric Antigen Receptor sequence"
MALPVTALLLPLALLLHAARPDIVLTQSPASLAVSLGERATINCRASESVSVIGAHLIHWYQQKPGQPPKLLIYLASNLETGVPARFSGSGSGTDFTLTISSLQAEDAAIYYCLQSRIFPRTFGQGTKLEIKGSTSGSGKPGSGEGSTKGQIQLVQSGSELKKPGESVKISCKASGYTFTDYSINWVKQAPGQGLKWMGWINTETREPAYAYDFRGRFVFSLDTSASTAYLQISSLKAEDTAVYFCALDYSYAMDYWGQGTLVTVSSAAATTTPAPRPPTPAPTIASQPLSLRPEACRPAAGGAVHTRGLDFACDIYIWAPLAGTCGVLLLSLVITLYCKRGRKKLLYIFKQPFMRPVQTTQEEDGCSCRFPEEEEGGCELRVKFSRSADAPAYQQGQNQLYNELNLGRREEYDVLDKRRGRDPEMGGKPRRKNPQEGLYNELQKDKMAEAYSEIGMKGERRRGKGHDGLYQGLSTATKDTYDALHMQALPPR

SEQ ID NO: 1386 - protein, 493 aa, Artificial Sequence
  source: /note="Description of Artificial Sequence: Synthetic Chimeric Antigen Receptor sequence"
MALPVTALLLPLALLLHAARPDIVLTQSPASLAVSLGERATINCRASESVSVIGAHLIHWYQQKPGQPPKLLIYLASNLETGVPARFSGSGSGTDFTLTISSLQAEDAAIYYCLQSRIFPRTFGQGTKLEIKGSTSGSGKPGSGEGSTKGQVQLVQSGSELKKPGASVKVSCKASGYTFTDYSINWVRQAPGQGLEWMGWINTETREPAYAYDFRGRFVFSLDTSVSTAYLQISSLKAEDTAVYYCARDYSYAMDYWGQGTLVTVSSAAATTTPAPRPPTPAPTIASQPLSLRPEACRPAAGGAVHTRGLDFACDIYIWAPLAGTCGVLLLSLVITLYCKRGRKKLLYIFKQPFMRPVQTTQEEDGCSCRFPEEEEGGCELRVKFSRSADAPAYQQGQNQLYNELNLGRREEYDVLDKRRGRDPEMGGKPRRKNPQEGLYNELQKDKMAEAYSEIGMKGERRRGKGHDGLYQGLSTATKDTYDALHMQALPPR

SEQ ID NO: 1387 - protein, 493 aa, Artificial Sequence
  source: /note="Description of Artificial Sequence: Synthetic Chimeric Antigen Receptor sequence"
MALPVTALLLPLALLLHAARPDIVLTQSPASLAVSLGERATINCRASESVSVIGAHLIHWYQQKPGQPPKLLIYLASNLETGVPARFSGSGSGTDFTLTISSLQAEDAAIYYCLQSRIFPRTFGQGTKLEIKGSTSGSGKPGSGEGSTKGQVQLVQSGSELKKPGESVKISCKASGYTFTDYSINWVKQAPGQGLKWMGWINTETREPAYAYDFRGRFVFSLDTSASTAYLQISSLKAEDTAVYFCALDYSYAMDYWGQGTLVTVSSAAATTTPAPRPPTPAPTIASQPLSLRPEACRPAAGGAVHTRGLDFACDIYIWAPLAGTCGVLLLSLVITLYCKRGRKKLLYIFKQPFMRPVQTTQEEDGCSCRFPEEEEGGCELRVKFSRSADAPAYQQGQNQLYNELNLGRREEYDVLDKRRGRDPEMGGKPRRKNPQEGLYNELQKDKMAEAYSEIGMKGERRRGKGHDGLYQGLSTATKDTYDALHMQALPPR

SEQ ID NO: 1388 - protein, 493 aa, Artificial Sequence
  source: /note="Description of Artificial Sequence: Synthetic Chimeric Antigen Receptor sequence"
MALPVTALLLPLALLLHAARPDIVLTQSPASLAVSLGERATINCRASESVSVIGAHLIHWYQQKPGQPPKLLIYLASNLETGVPARFSGSGSGTDFTLTISSLQAEDAAIYYCLQSRIFPRTFGQGTKLEIKGSTSGSGKPGSGEGSTKGQVQLVQSGSELKKPGESVKISCKASGYTFTDYSINWVRQAPGQGLEWMGWINTETREPAYAYDFRGRFVFSLDTSASTAYLQISSLKAEDTAVYFCALDYSYAMDYWGQGTLVTVSSAAATTTPAPRPPTPAPTIASQPLSLRPEACRPAAGGAVHTRGLDFACDIYIWAPLAGTCGVLLLSLVITLYCKRGRKKLLYIFKQPFMRPVQTTQEEDGCSCRFPEEEEGGCELRVKFSRSADAPAYQQGQNQLYNELNLGRREEYDVLDKRRGRDPEMGGKPRRKNPQEGLYNELQKDKMAEAYSEIGMKGERRRGKGHDGLYQGLSTATKDTYDALHMQALPPR

SEQ ID NO: 1389 - protein, 493 aa, Artificial Sequence
  source: /note="Description of Artificial Sequence: Synthetic Chimeric Antigen Receptor sequence"
MALPVTALLLPLALLLHAARPDIVLTQSPASLAVSLGERATINCRASESVSVIGAHLIHWYQQKPGQPPKLLIYLASNLETGVPARFSGSGSGTDFTLTISSLQAEDAAIYYCLQSRIFPRTFGQGTKLEIKGSTSGSGKPGSGEGSTKGQVQLVQSGSELKKPGESVKVSCKASGYTFTDYSINWVRQAPGQGLEWMGWINTETREPAYAYDFRGRFVFSLDTSVSTAYLQISSLKAEDTAVYYCALDYSYAMDYWGQGTLVTVSSAAATTTPAPRPPTPAPTIASQPLSLRPEACRPAAGGAVHTRGLDFACDIYIWAPLAGTCGVLLLSLVITLYCKRGRKKLLYIFKQPFMRPVQTTQEEDGCSCRFPEEEEGGCELRVKFSRSADAPAYQQGQNQLYNELNLGRREEYDVLDKRRGRDPEMGGKPRRKNPQEGLYNELQKDKMAEAYSEIGMKGERRRGKGHDGLYQGLSTATKDTYDALHMQALPPR

SEQ ID NO: 1390 - protein, 493 aa, Artificial Sequence
  source: /note="Description of Artificial Sequence: Synthetic Chimeric Antigen Receptor sequence"
MALPVTALLLPLALLLHAARPQVQLVQSGAEVKKPGASVKVSCKASGYSFPDYYINWVRQAPGQGLEWMGWIYFASGNSEYNQKFTGRVTMTRDTSINTAYMELSSLTSEDTAVYFCASLYDYDWYFDVWGQGTMVTVSSGGGGSGGGGSGGGGSDIVMTQTPLSLSVTPGQPASISCKSSQSLVHSNGNTYLHWYLQKPGQSPQLLIYKVSNRFSGVPDRFSGSGSGTDFTLKISRVEAEDVGIYYCSQSSIYPWTFGQGTKLEIKTTTPAPRPPTPAPTIASQPLSLRPEACRPAAGGAVHTRGLDFACDIISFFLALTSTALLFLLFFLTLRFSVVKRGRKKLLYIFKQPFMRPVQTTQEEDGCSCRFPEEEEGGCELRVKFSRSADAPAYQQGQNQLYNELNLGRREEYDVLDKRRGRDPEMGGKPRRKNPQEGLYNELQKDKMAEAYSEIGMKGERRRGKGHDGLYQGLSTATKDTYDALHMQALPPR

SEQ ID NO: 1391 - protein, 493 aa, Artificial Sequence
  source: /note="Description of Artificial Sequence: Synthetic Chimeric Antigen Receptor sequence"
MALPVTALLLPLALLLHAARPQVQLVQSGAEVKKPGASVKVSCKASGYSFPDYYINWVRQAPGQGLEWMGWIYFASGNSEYNQKFTGRVTMTRDTSSSTAYMELSSLRSEDTAVYFCASLYDYDWYFDVWGQGTMVTVSSGGGGSGGGGSGGGGSDIVMTQTPLSLSVTPGEPASISCKSSQSLVHSNGNTYLHWYLQKPGQSPQLLIYKVSNRFSGVPDRFSGSGSGADFTLKISRVEAEDVGVYYCAETSHVPWTFGQGTKLEIKTTTPAPRPPTPAPTIASQPLSLRPEACRPAAGGAVHTRGLDFACDIISFFLALTSTALLFLLFFLTLRFSVVKRGRKKLLYIFKQPFMRPVQTTQEEDGCSCRFPEEEEGGCELRVKFSRSADAPAYQQGQNQLYNELNLGRREEYDVLDKRRGRDPEMGGKPRRKNPQEGLYNELQKDKMAEAYSEIGMKGERRRGKGHDGLYQGLSTATKDTYDALHMQALPPR

SEQ ID NO: 1392 - protein, 496 aa, Artificial Sequence
  source: /note="Description of Artificial Sequence: Synthetic Chimeric Antigen Receptor sequence"
EVQLLESGGGLVQPGGSLRLSCAASGFTFSSYAMNWVRQAPGKGLEWVSAILSSGGSTYYADSVKGRFTISRDNSKNTLYLQMNSLRAEDTAVYYCARYWPMDIWGQGTLVTVSSGGGGGSCPYSNPSLCSGGGGGSEIVLTQSPGTLSLSPGERATLSCRGGQSVSSSYLAWYQQKPGQAPRLLMYDASIRATGIPDRFSGSGSGTDFTLTISRLEPEDFAVYYCQQYQSWPLTFGQGTKVEIKSDPGSGGGGSCPYSNPSLCSGGGGSAPTTTPAPRPPTPAPTIASQPLSLRPEACRPAAGGAVHTRGLDFACDIYIWAPLAGTCGVLLLSLVITLYCRRGRKKLLYIFKQPFMRPVQTTQEEDGCSCRFPEEEEGGCELRVKFSRSADAPAYQQGQNQLYNELNLGRREEYDVLDKRRGRDPEMGGKPRRKNPQEGLYNELQKDKMAEAYSEIGMKGERRRGKGHDGLYQGLSTATKDTYDALHMQALPPRE

SEQ ID NO: 1393 - protein, 497 aa, Artificial Sequence
  source: /note="Description of Artificial Sequence: Synthetic Chimeric Antigen Receptor sequence"
GGGGSCPYSNPSLCSGGGGSGGGGSEVQLLESGGGLVQPGGSLRLSCAASGFTFSSYAMNWVRQAPGKGLEWVSAILSSGGSTYYADSVKGRFTISRDNSKNTLYLQMNSLRAEDTAVYYCARYWPMDIWGQGTLVTVSSGGGGGSCPYSNPSLCSGGGGGSEIVLTQSPGTLSLSPGERATLSCRGGQSVSSSYLAWYQQKPGQAPRLLMYDASIRATGIPDRFSGSGSGTDFTLTISRLEPEDFAVYYCQQYQSWPLTFGQGTKVEIKSDPTTTPAPRPPTPAPTIASQPLSLRPEACRPAAGGAVHTRGLDFACDIYIWAPLAGTCGVLLLSLVITLYCRRGRKKLLYIFKQPFMRPVQTTQEEDGCSCRFPEEEEGGCELRVKFSRSADAPAYQQGQNQLYNELNLGRREEYDVLDKRRGRDPEMGGKPRRKNPQEGLYNELQKDKMAEAYSEIGMKGERRRGKGHDGLYQGLSTATKDTYDALHMQALPPRE

SEQ ID NO: 1394 - protein, 498 aa, Artificial Sequence
  source: /note="Description of Artificial Sequence: Synthetic Chimeric Antigen Receptor sequence"
EVQLLESGGGLVQPGGSLRLSCAASGFTFSSYAMNWVRQAPGKGLEWVSAILSSGGSTYYADSVKGRFTISRDNSKNTLYLQMNSLRAEDTAVYYCARYWPMDIWGQGTLVTVSSGGGGSGGGGSGGGGSEIVLTQSPGTLSLSPGERATLSCRGGQSVSSSYLAWYQQKPGQAPRLLMYDASIRATGIPDRFSGSGSGTDFTLTISRLEPEDFAVYYCQQYQSWPLTFGQGTKVEIKSDPGSGGGGSCPYSNPSLCSGGGGSCPYSNPSLCAPTTTPAPRPPTPAPTIASQPLSLRPEACRPAAGGAVHTRGLDFACDIYIWAPLAGTCGVLLLSLVITLYCRRGRKKLLYIFKQPFMRPVQTTQEEDGCSCRFPEEEEGGCELRVKFSRSADAPAYQQGQNQLYNELNLGRREEYDVLDKRRGRDPEMGGKPRRKNPQEGLYNELQKDKMAEAYSEIGMKGERRRGKGHDGLYQGLSTATKDTYDALHMQALPPRE

SEQ ID NO: 1395 - protein, 500 aa, Artificial Sequence
  source: /note="Description of Artificial Sequence: Synthetic Chimeric Antigen Receptor sequence"
GGGGSCPYSNPSLCSGGGGSCPYSNPSLCSGGGGSEVQLLESGGGLVQPGGSLRLSCAASGFTFSSYAMNWVRQAPGKGLEWVSAILSSGGSTYYADSVKGRFTISRDNSKNTLYLQMNSLRAEDTAVYYCARYWPMDIWGQGTLVTVSSGGGGSGGGGSGGGGSEIVLTQSPGTLSLSPGERATLSCRGGQSVSSSYLAWYQQKPGQAPRLLMYDASIRATGIPDRFSGSGSGTDFTLTISRLEPEDFAVYYCQQYQSWPLTFGQGTKVEIKSDPTTTPAPRPPTPAPTIASQPLSLRPEACRPAAGGAVHTRGLDFACDIYIWAPLAGTCGVLLLSLVITLYCRRGRKKLLYIFKQPFMRPVQTTQEEDGCSCRFPEEEEGGCELRVKFSRSADAPAYQQGQNQLYNELNLGRREEYDVLDKRRGRDPEMGGKPRRKNPQEGLYNELQKDKMAEAYSEIGMKGERRRGKGHDGLYQGLSTATKDTYDALHMQALPPRE

SEQ ID NO: 1396 - protein, 500 aa, Artificial Sequence
  source: /note="Description of Artificial Sequence: Synthetic Chimeric Antigen Receptor sequence"
QVQLVQSGAEVKKPGASVKVSCKASGYSFPDYYINWVRQAPGQGLEWMGWIYFASGNSEYNQKFTGRVTMTRDTSSSTAYMELSSLRSEDTAVYFCASLYDYDWYFDVWGQGTMVTVSSGGGGSGGGGSGGGGSDIVMTQTPLSLSVTPGEPASISCKSSQSLVHSNGNTYLHWYLQKPGQSPQLLIYKVSNRFSGVPDRFSGSGSGADFTLKISRVEAEDVGVYYCAETSHVPWTFGQGTKLEIKGSGGGGSCPYSNPSLCSGGGGSCPYSNPSLCTTTPAPRPPTPAPTIASQPLSLRPEACRPAAGGAVHTRGLDFACDIYIWAPLAGTCGVLLLSLVITLYCKRGRKKLLYIFKQPFMRPVQTTQEEDGCSCRFPEEEEGGCELRVKFSRSADAPAYQQGQNQLYNELNLGRREEYDVLDKRRGRDPEMGGKPRRKNPQEGLYNELQKDKMAEAYSEIGMKGERRRGKGHDGLYQGLSTATKDTYDALHMQALPPR

SEQ ID NO: 1397 - protein, 502 aa, Artificial Sequence
  source: /note="Description of Artificial Sequence: Synthetic Chimeric Antigen Receptor sequence"
MALPVTALLLPLALLLHAARPDIVLTQSPPSLAMSLGKRATISCRASESVTILGSHLIHWYQQKPGQPPTLLIQLASNVQTGVPARFSGSGSRTDFTLTIDPVEEDDVAVYYCLQSRTIPRTFGGGTKLEIKGSTSGSGKPGSGEGSTKGQIQLVQSGPELKKPGETVKISCKASGYTFTDYSINWVKRAPGKGLKWMGWINTETREPAYAYDFRGRFAFSLETSASTAYLQINNLKYEDTATYFCALDYSYAMDYWGQGTSVTVSSAAAFVPVFLPAKPTTTPAPRPPTPAPTIASQPLSLRPEACRPAAGGAVHTRGLDFACDIYIWAPLAGTCGVLLLSLVITLYCNHRNRRDQRLPPDAHKPPGGGSFRTPIQEEQADAHSTLAKIRVKFSRSADAPAYQQGQNQLYNELNLGRREEYDVLDKRRGRDPEMGGKPRRKNPQEGLYNELQKDKMAEAYSEIGMKGERRRGKGHDGLYQGLSTATKDTYDALHMQALPPR

SEQ ID NO: 1398 - protein, 503 aa, Artificial Sequence
  source: /note="Description of Artificial Sequence: Synthetic Chimeric Antigen Receptor sequence"
MALPVTALLLPLALLLHAARPDIVLTQSPPSLAMSLGKRATISCRASESVTILGSHLIHWYQQKPGQPPTLLIQLASNVQTGVPARFSGSGSRTDFTLTIDPVEEDDVAVYYCLQSRTIPRTFGGGTKLEIKGSTSGSGKPGSGEGSTKGQIQLVQSGPELKKPGETVKISCKASGYTFTDYSINWVKRAPGKGLKWMGWINTETREPAYAYDFRGRFAFSLETSASTAYLQINNLKYEDTATYFCALDYSYAMDYWGQGTSVTVSSFVPVFLPAKPTTTPAPRPPTPAPTIASQPLSLRPEACRPAAGGAVHTRGLDFACDIYIWAPLAGTCGVLLLSLVITLYCNHRNRSKRSRLLHSDYMNMTPRRPGPTRKHYQPYAPPRDFAAYRSRVKFSRSADAPAYQQGQNQLYNELNLGRREEYDVLDKRRGRDPEMGGKPRRKNPQEGLYNELQKDKMAEAYSEIGMKGERRRGKGHDGLYQGLSTATKDTYDALHMQALPPR

SEQ ID NO: 1399 - protein, 503 aa, Artificial Sequence
  source: /note="Description of Artificial Sequence: Synthetic Chimeric Antigen Receptor sequence"
MALPVTALLLPLALLLHAARPDIVLTQSPPSLAMSLGKRATISCRASESVTILGSHLIYWYQQKPGQPPTLLIQLASNVQTGVPARFSGSGSRTDFTLTIDPVEEDDVAVYYCLQSRTIPRTFGGGTKLEIKGSTSGSGKPGSGEGSTKGQIQLVQSGPELKKPGETVKISCKASGYTFRHYSMNWVKQAPGKGLKWMGRINTESGVPIYADDFKGRFAFSVETSASTAYLVINNLKDEDTASYFCSNDYLYSLDFWGQGTALTVSSFVPVFLPAKPTTTPAPRPPTPAPTIASQPLSLRPEACRPAAGGAVHTRGLDFACDIYIWAPLAGTCGVLLLSLVITLYCNHRNRSKRSRLLHSDYMNMTPRRPGPTRKHYQPYAPPRDFAAYRSRVKFSRSADAPAYQQGQNQLYNELNLGRREEYDVLDKRRGRDPEMGGKPRRKNPQEGLYNELQKDKMAEAYSEIGMKGERRRGKGHDGLYQGLSTATKDTYDALHMQALPPR

SEQ ID NO: 1400 - protein, 503 aa, Artificial Sequence
  source: /note="Description of Artificial Sequence: Synthetic Chimeric Antigen Receptor sequence"
MALPVTALLLPLALLLHAARPDIVLTQSPPSLAMSLGKRATISCRASESVTILGSHLIYWYQQKPGQPPTLLIQLASNVQTGVPARFSGSGSRTDFTLTIDPVEEDDVAVYYCLQSRTIPRTFGGGTKLEIKGSTSGSGKPGSGEGSTKGQIQLVQSGPELKKPGETVKISCKASGYTFTHYSMNWVKQAPGKGLKWMGRINTETGEPLYADDFKGRFAFSLETSASTAYLVINNLKNEDTATFFCSNDYLYSCDYWGQGTTLTVSSFVPVFLPAKPTTTPAPRPPTPAPTIASQPLSLRPEACRPAAGGAVHTRGLDFACDIYIWAPLAGTCGVLLLSLVITLYCNHRNRSKRSRLLHSDYMNMTPRRPGPTRKHYQPYAPPRDFAAYRSRVKFSRSADAPAYQQGQNQLYNELNLGRREEYDVLDKRRGRDPEMGGKPRRKNPQEGLYNELQKDKMAEAYSEIGMKGERRRGKGHDGLYQGLSTATKDTYDALHMQALPPR

SEQ ID NO: 1401 - protein, 504 aa, Artificial Sequence
  source: /note="Description of Artificial Sequence: Synthetic Chimeric Antigen Receptor sequence"
EVQLLESGGGLVQPGGSLRLSCAASGFTFSSYAMNWVRQAPGKGLEWVSAILSSGGSTYYADSVKGRFTISRDNSKNTLYLQMNSLRAEDTAVYYCARYWPMDIWGQGTLVTVSSGGGGSGGGGSGGGGSEIVLTQSPGTLSLSPGERATLSCRGGQSVSSSYLAWYQQKPGQAPRLLMYDASIRATGIPDRFSGSGSGTDFTLTISRLEPEDFAVYYCQQYQSWPLTFGQGTKVEIKSDPGSGGGGSCPYSNPSLCSGGGGSCPYSNPSLCSGGGGSAPTTTPAPRPPTPAPTIASQPLSLRPEACRPAAGGAVHTRGLDFACDIYIWAPLAGTCGVLLLSLVITLYCRRGRKKLLYIFKQPFMRPVQTTQEEDGCSCRFPEEEEGGCELRVKFSRSADAPAYQQGQNQLYNELNLGRREEYDVLDKRRGRDPEMGGKPRRKNPQEGLYNELQKDKMAEAYSEIGMKGERRRGKGHDGLYQGLSTATKDTYDALHMQALPPRE

SEQ ID NO: 1402 - protein, 506 aa, Artificial Sequence
  source: /note="Description of Artificial Sequence: Synthetic Chimeric Antigen Receptor sequence"
MALPVTALLLPLALLLHAARPDIVLTQSPPSLAMSLGKRATISCRASESVTILGSHLIHWYQQKPGQPPTLLIQLASNVQTGVPARFSGSGSRTDFTLTIDPVEEDDVAVYYCLQSRTIPRTFGGGTKLEIKGSTSGSGKPGSGEGSTKGQIQLVQSGPELKKPGETVKISCKASGYTFTDYSINWVKRAPGKGLKWMGWINTETREPAYAYDFRGRFAFSLETSASTAYLQINNLKYEDTATYFCALDYSYAMDYWGQGTSVTVSSAAAFVPVFLPAKPTTTPAPRPPTPAPTIASQPLSLRPEACRPAAGGAVHTRGLDFACDIYIWAPLAGTCGVLLLSLVITLYCNHRNRSKRSRLLHSDYMNMTPRRPGPTRKHYQPYAPPRDFAAYRSRVKFSRSADAPAYQQGQNQLYNELNLGRREEYDVLDKRRGRDPEMGGKPRRKNPQEGLYNELQKDKMAEAYSEIGMKGERRRGKGHDGLYQGLSTATKDTYDALHMQALPPR

SEQ ID NO: 1403 - protein, 506 aa, Artificial Sequence
  source: /note="Description of Artificial Sequence: Synthetic Chimeric Antigen Receptor sequence"
QVQLVQSGAEVKKPGASVKVSCKASGYSFPDYYINWVRQAPGQGLEWMGWIYFASGNSEYNQKFTGRVTMTRDTSSSTAYMELSSLRSEDTAVYFCASLYDYDWYFDVWGQGTMVTVSSGGGGSGGGGSGGGGSDIVMTQTPLSLSVTPGEPASISCKSSQSLVHSNGNTYLHWYLQKPGQSPQLLIYKVSNRFSGVPDRFSGSGSGADFTLKISRVEAEDVGVYYCAETSHVPWTFGQGTKLEIKGSGGGGSCPYSNPSLCSGGGGSCPYSNPSLCSGGGGSTTTPAPRPPTPAPTIASQPLSLRPEACRPAAGGAVHTRGLDFACDIYIWAPLAGTCGVLLLSLVITLYCKRGRKKLLYIFKQPFMRPVQTTQEEDGCSCRFPEEEEGGCELRVKFSRSADAPAYQQGQNQLYNELNLGRREEYDVLDKRRGRDPEMGGKPRRKNPQEGLYNELQKDKMAEAYSEIGMKGERRRGKGHDGLYQGLSTATKDTYDALHMQALPPR

SEQ ID NO: 1404 - protein, 507 aa, Artificial Sequence
  source: /note="Description of Artificial Sequence: Synthetic Chimeric Antigen Receptor sequence"
MLLLVTSLLLCELPHPAFLLIPDIVLTQSPPSLAMSLGKRATISCRASESVTILGSHLIHWYQQKPGQPPTLLIQLASNVQTGVPARFSGSGSRTDFTLTIDPVEEDDVAVYYCLQSRTIPRTFGGGTKLEIKGSTSGSGKPGSGEGSTKGQIQLVQSGPELKKPGETVKISCKASGYTFTDYSINWVKRAPGKGLKWMGWINTETREPAYAYDFRGRFAFSLETSASTAYLQINNLKYEDTATYFCALDYSYAMDYWGQGTSVTVSSAAAFVPVFLPAKPTTTPAPRPPTPAPTIASQPLSLRPEACRPAAGGAVHTRGLDFACDIYIWAPLAGTCGVLLLSLVITLYCNHRNRSKRSRLLHSDYMNMTPRRPGPTRKHYQPYAPPRDFAAYRSRVKFSRSADAPAYQQGQNQLYNELNLGRREEYDVLDKRRGRDPEMGGKPRRKNPQEGLYNELQKDKMAEAYSEIGMKGERRRGKGHDGLYQGLSTATKDTYDALHMQALPPR

SEQ ID NO: 1405 - protein, 512 aa, Artificial Sequence
  source: /note="Description of Artificial Sequence: Synthetic Chimeric Antigen Receptor sequence"
MALPVTALLLPLALLLHAARPDIVLTQSPPSLAMSLGKRATISCRASESVTILGSHLIHWYQQKPGQPPTLLIQLASNVQTGVPARFSGSGSRTDFTLTIDPVEEDDVAVYYCLQSRTIPRTFGGGTKLEIKGSTSGSGKPGSGEGSTKGQIQLVQSGPELKKPGETVKISCKASGYTFTDYSINWVKRAPGKGLKWMGWINTETREPAYAYDFRGRFAFSLETSASTAYLQINNLKYEDTATYFCALDYSYAMDYWGQGTSVTVSSAAAFVPVFLPAKPTTTPAPRPPTPAPTIASQPLSLRPEACRPAAGGAVHTRGLDFACDIYIWAPLAGTCGVLLLSLVITLYCNHRNRFSVVKRGRKKLLYIFKQPFMRPVQTTQEEDGCSCRFPEEEEGGCELRVKFSRSADAPAYQQGQNQLYNELNLGRREEYDVLDKRRGRDPEMGGKPRRKNPQEGLYNELQKDKMAEAYSEIGMKGERRRGKGHDGLYQGLSTATKDTYDALHMQALPPR

SEQ ID NO: 1406 - protein, 513 aa, Artificial Sequence
  source: /note="Description of Artificial Sequence: Synthetic Chimeric Antigen Receptor sequence"
EVQLLESGGGLVQPGGSLRLSCAASGFTFSSYAMNWVRQAPGKGLEWVSAILSSGGSTYYADSVKGRFTISRDNSKNTLYLQMNSLRAEDTAVYYCARYWPMDIWGQGTLVTVSSGGGGSGGGGSGGGGSEIVLTQSPGTLSLSPGERATLSCRGGQSVSSSYLAWYQQKPGQAPRLLMYDASIRATGIPDRFSGSGSGTDFTLTISRLEPEDFAVYYCQQYQSWPLTFGQGTKVEIKSDPGSGGGGSCPYSNPSLCSGGGGSCPYSNPSLCSGGGGSCPYSNPSLCAPTTTPAPRPPTPAPTIASQPLSLRPEACRPAAGGAVHTRGLDFACDIYIWAPLAGTCGVLLLSLVITLYCRRGRKKLLYIFKQPFMRPVQTTQEEDGCSCRFPEEEEGGCELRVKFSRSADAPAYQQGQNQLYNELNLGRREEYDVLDKRRGRDPEMGGKPRRKNPQEGLYNELQKDKMAEAYSEIGMKGERRRGKGHDGLYQGLSTATKDTYDALHMQALPPRE

SEQ ID NO: 1407 - protein, 514 aa, Artificial Sequence
  source: /note="Description of Artificial Sequence: Synthetic Chimeric Antigen Receptor sequence"
GGGGSCPYSNPSLCSGGGGSGGGGSEVQLLESGGGLVQPGGSLRLSCAASGFTFSSYAMNWVRQAPGKGLEWVSAILSSGGSTYYADSVKGRFTISRDNSKNTLYLQMNSLRAEDTAVYYCARYWPMDIWGQGTLVTVSSGGGGSGGGGSGGGGSEIVLTQSPGTLSLSPGERATLSCRGGQSVSSSYLAWYQQKPGQAPRLLMYDASIRATGIPDRFSGSGSGTDFTLTISRLEPEDFAVYYCQQYQSWPLTFGQGTKVEIKSDPGSGGGGSCPYSNPSLCSGGGGSAPTTTPAPRPPTPAPTIASQPLSLRPEACRPAAGGAVHTRGLDFACDIYIWAPLAGTCGVLLLSLVITLYCRRGRKKLLYIFKQPFMRPVQTTQEEDGCSCRFPEEEEGGCELRVKFSRSADAPAYQQGQNQLYNELNLGRREEYDVLDKRRGRDPEMGGKPRRKNPQEGLYNELQKDKMAEAYSEIGMKGERRRGKGHDGLYQGLSTATKDTYDALHMQALPPRE

SEQ ID NO: 1408 - protein, 515 aa, Artificial Sequence
  source: /note="Description of Artificial Sequence: Synthetic Chimeric Antigen Receptor sequence"
GGGGSCPYSNPSLCSGGGGSGGGGSEVQLLESGGGLVQPGGSLRLSCAASGFTFSSYAMNWVRQAPGKGLEWVSAILSSGGSTYYADSVKGRFTISRDNSKNTLYLQMNSLRAEDTAVYYCARYWPMDIWGQGTLVTVSSGGSCPYSNPSLCSGGSEIVLTQSPGTLSLSPGERATLSCRGGQSVSSSYLAWYQQKPGQAPRLLMYDASIRATGIPDRFSGSGSGTDFTLTISRLEPEDFAVYYCQQYQSWPLTFGQGTKVEIKSDPGSGGGGSCPYSNPSLCSGGGGSAPTTTPAPRPPTPAPTIASQPLSLRPEACRPAAGGAVHTRGLDFACDIYIWAPLAGTCGVLLLSLVITLYCRRGRKKLLYIFKQPFMRPVQTTQEEDGCSCRFPEEEEGGCELRVKFSRSADAPAYQQGQNQLYNELNLGRREEYDVLDKRRGRDPEMGGKPRRKNPQEGLYNELQKDKMAEAYSEIGMKGERRRGKGHDGLYQGLSTATKDTYDALHMQALPPRE

SEQ ID NO: 1409 - protein, 521 aa, Artificial Sequence
  source: /note="Description of Artificial Sequence: Synthetic Chimeric Antigen Receptor sequence"
GGGGSCPYSNPSLCSGGGGSGGGGSEVQLLESGGGLVQPGGSLRLSCAASGFTFSSYAMNWVRQAPGKGLEWVSAILSSGGSTYYADSVKGRFTISRDNSKNTLYLQMNSLRAEDTAVYYCARYWPMDIWGQGTLVTVSSGGGGGSCPYSNPSLCSGGGGGSEIVLTQSPGTLSLSPGERATLSCRGGQSVSSSYLAWYQQKPGQAPRLLMYDASIRATGIPDRFSGSGSGTDFTLTISRLEPEDFAVYYCQQYQSWPLTFGQGTKVEIKSDPGSGGGGSCPYSNPSLCSGGGGSAPTTTPAPRPPTPAPTIASQPLSLRPEACRPAAGGAVHTRGLDFACDIYIWAPLAGTCGVLLLSLVITLYCRRGRKKLLYIFKQPFMRPVQTTQEEDGCSCRFPEEEEGGCELRVKFSRSADAPAYQQGQNQLYNELNLGRREEYDVLDKRRGRDPEMGGKPRRKNPQEGLYNELQKDKMAEAYSEIGMKGERRRGKGHDGLYQGLSTATKDTYDALHMQALPPRE

SEQ ID NO: 1410 - protein, 522 aa, Artificial Sequence
  source: /note="Description of Artificial Sequence: Synthetic Chimeric Antigen Receptor sequence"
EVQLLESGGGLVQPGGSLRLSCAASGFTFSSYAMNWVRQAPGKGLEWVSAILSSGGSTYYADSVKGRFTISRDNSKNTLYLQMNSLRAEDTAVYYCARYWPMDIWGQGTLVTVSSGGGGSGGGGSGGGGSEIVLTQSPGTLSLSPGERATLSCRGGQSVSSSYLAWYQQKPGQAPRLLMYDASIRATGIPDRFSGSGSGTDFTLTISRLEPEDFAVYYCQQYQSWPLTFGQGTKVEIKSDPGSGGGGSCPYSNPSLCSGGGGSELPTQGTFSNVSTNVSPAKPTTTACPYSNPSLCAPTTTPAPRPPTPAPTIASQPLSLRPEACRPAAGGAVHTRGLDFACDIYIWAPLAGTCGVLLLSLVITLYCRRGRKKLLYIFKQPFMRPVQTTQEEDGCSCRFPEEEEGGCELRVKFSRSADAPAYQQGQNQLYNELNLGRREEYDVLDKRRGRDPEMGGKPRRKNPQEGLYNELQKDKMAEAYSEIGMKGERRRGKGHDGLYQGLSTATKDTYDALHMQALPPRE

SEQ ID NO: 1411 - protein, 523 aa, Artificial Sequence
  source: /note="Description of Artificial Sequence: Synthetic Chimeric Antigen Receptor sequence"
EVQLLESGGGLVQPGGSLRLSCAASGFTFSSYAMNWVRQAPGKGLEWVSAILSSGGSTYYADSVKGRFTISRDNSKNTLYLQMNSLRAEDTAVYYCARYWPMDIWGQGTLVTVSSGGSCPYSNPSLCSGGSEIVLTQSPGTLSLSPGERATLSCRGGQSVSSSYLAWYQQKPGQAPRLLMYDASIRATGIPDRFSGSGSGTDFTLTISRLEPEDFAVYYCQQYQSWPLTFGQGTKVEIKSDPGSGGGGSCPYSNPSLCSGGGGSELPTQGTFSNVSTNVSPAKPTTTACPYSNPSLCAPTTTPAPRPPTPAPTIASQPLSLRPEACRPAAGGAVHTRGLDFACDIYIWAPLAGTCGVLLLSLVITLYCRRGRKKLLYIFKQPFMRPVQTTQEEDGCSCRFPEEEEGGCELRVKFSRSADAPAYQQGQNQLYNELNLGRREEYDVLDKRRGRDPEMGGKPRRKNPQEGLYNELQKDKMAEAYSEIGMKGERRRGKGHDGLYQGLSTATKDTYDALHMQALPPRE

SEQ ID NO: 1412 - protein, 547 aa, Artificial Sequence
  source: /note="Description of Artificial Sequence: Synthetic Chimeric Antigen Receptor sequence"
GGGGSCPYSNPSLCSGGGGSGGGGSEVQLLESGGGLVQPGGSLRLSCAASGFTFSSYAMNWVRQAPGKGLEWVSAILSSGGSTYYADSVKGRFTISRDNSKNTLYLQMNSLRAEDTAVYYCARYWPMDIWGQGTLVTVSSGGGGSGGGGSGGGGSEIVLTQSPGTLSLSPGERATLSCRGGQSVSSSYLAWYQQKPGQAPRLLMYDASIRATGIPDRFSGSGSGTDFTLTISRLEPEDFAVYYCQQYQSWPLTFGQGTKVEIKSDPGSGGGGSCPYSNPSLCSGGGGSELPTQGTFSNVSTNVSPAKPTTTACPYSNPSLCAPTTTPAPRPPTPAPTIASQPLSLRPEACRPAAGGAVHTRGLDFACDIYIWAPLAGTCGVLLLSLVITLYCRRGRKKLLYIFKQPFMRPVQTTQEEDGCSCRFPEEEEGGCELRVKFSRSADAPAYQQGQNQLYNELNLGRREEYDVLDKRRGRDPEMGGKPRRKNPQEGLYNELQKDKMAEAYSEIGMKGERRRGKGHDGLYQGLSTATKDTYDALHMQALPPRE

SEQ ID NO: 1413 - protein, 549 aa, Artificial Sequence
  source: /note="Description of Artificial Sequence: Synthetic Chimeric Antigen Receptor sequence"
MALPVTALLLPLALLLHAARPDIVLTQSPPSLAMSLGKRATISCRASESVTILGSHLIHWYQQKPGQPPTLLIQLASNVQTGVPARFSGSGSRTDFTLTIDPVEEDDVAVYYCLQSRTIPRTFGGGTKLEIKGSTSGSGKPGSGEGSTKGQIQLVQSGPELKKPGETVKISCKASGYTFTDYSINWVKRAPGKGLKWMGWINTETREPAYAYDFRGRFAFSLETSASTAYLQINNLKYEDTATYFCALDYSYAMDYWGQGTSVTVSSAAAFVPVFLPAKPTTTPAPRPPTPAPTIASQPLSLRPEACRPAAGGAVHTRGLDFACDIYIWAPLAGTCGVLLLSLVITLYCNHRNRFSVVKRGRKKLLYIFKQPFMRPVQTTQEEDGCSCRFPEEEEGGCELRRDQRLPPDAHKPPGGGSFRTPIQEEQADAHSTLAKIRVKFSRSADAPAYQQGQNQLYNELNLGRREEYDVLDKRRGRDPEMGGKPRRKNPQEGLYNELQKDKMAEAYSEIGMKGERRRGKGHDGLYQGLSTATKDTYDALHMQALPPR

SEQ ID NO: 1414 - protein, 610 aa, Artificial Sequence
  source: /note="Description of Artificial Sequence: Synthetic Chimeric Antigen Receptor sequence"
METDTLLLWVLLLWVPGSTGSVLHLVPINATSKDDSDVTEVMWQPALRRGRGLQAQGYGVRIQDAGVYLLYSQVLFQDVTFTMGQWSREGQGRQETLFRCIRSMPSHPDRAYNSCYSAGVFHLHQGDILSVIIPRARAKLNLSPHGTFLGFVKLSGGGSDPAEPKSPDKTHTCPPCPAPPVAGPSVFLFPPKPKDTLMIARTPEVTCVWDVSHEDPEVKFNWYVDGVEVHNAKTKPREEQYNSTYRWSVLTVLHQDWLNGKEYKCKVSNKALPAPIEKTISKAKGQPREPQVYTLPPSRDELTKNQVSLTCLVKGFYPSDIAVEWESNGQPENNYKTTPPVLDSDGSFFLYSKLTVDKSRWQQGNVFSCSVMHEALHNHYTQKSLSLSPGKKDPKFWVLVVVGGVLACYSLLVTVAFIIFVRSKRSRLLHSDYMNMTPRRPGPTRKHYQPYAPPRDFAAYRSRDQRLPPDAHKPPGGGSFRTPIQEEQADAHSTLAKIRVKFSRSADAPAYQQGQNQLYNELNLGRREEYDVLDKRRGRDPEMGGKPRRKNPQEGLYNELQKDKMAEAYSEIGMKGERRRGKGHDGLYQGLSTATKDTYDALHMQALPPR

SEQ ID NO: 1415 - protein, 630 aa, Artificial Sequence
  source: /note="Description of Artificial Sequence: Synthetic Chimeric Antigen Receptor sequence"
MGTSLLCWMALCLLGADHADGKPIPNPLLGLDSTSGGGGSVLHLVPINATSKDDSDVTEVMWQPALRRGRGLQAQGYGVRIQDAGVYLLYSQVLFQDVTFTMGQVVSREGQGRQETLFRCIRSMPSHPDRAYNSCYSAGVFHLHQGDILSVIIPRARAKLNLSPHGTFLGFVKLSGGGSDPAEPKSPDKTHTCPPCPAPPVAGPSVFLFPPKPKDTLMIARTPEVTCVVVDVSHEDPEVKFNWYVDGVEVHNAKTKPREEQYNSTYRVVSVLTVLHQDWLNGKEYKCKVSNKALPAPIEKTISKAKGQPREPQVYTLPPSRDELTKNQVSLTCLVKGFYPSDIAVEWESNGQPENNYKTTPPVLDSDGSFFLYSKLTVDKSRWQQGNVFSCSVHEALHNHYTQKSLSLSPGKKDPKFWVLWVGGVLACYSLLVTVAFIIFWVRSKRSRLLHSDYMNMTPRRPGPTRKHYQPYAPPRDFAAYRSRDQRLPPDAHKPPGGGSFRTPIQEEQADAHSTLAKIRVKFSRSADAPAYQQGQNQLYNELNLGRREEYDVLDKRRGRDPEGGKPRRKNPQEGLYNELQKDKMAEAYSEIGMKGERRRGKGHDGLYQGLSTATKDTYDALHMQALPPR

SEQ ID NO: 1416 - protein, 633 aa, Artificial Sequence
  source: /note="Description of Artificial Sequence: Synthetic Chimeric Antigen Receptor sequence"
MGTSLLCWMALCLLGADHADGKPIPNPLLGLDSTSGGGGSVLHLVPINATSKDDSDVTEVMWQPALRRGRGLQAQGYGVRIQDAGVYLLYSQVLFQDVTFTMGQVVSREGQGRQETLFRCIRSMPSHPDRAYNSCYSAGVEHLHQGDILSVIIPRARAKLNLSPHGTFLGFVKLSGGGSDPAEPKSPDKTHTCPPCPAPPVAGPSVFLFPPKPKDTLMIARTPEVTCVVVDVSHEDPEVKFNWYVDGVEVHNAKTKPREEQYNSTYRVVSVLTVLHQDWLNGKEYKCKVSNKALPAPIEKTISKAKGQPREPQVYTLPPSRDELTKNQVSLTCLVKGFYPSDIAVEWESNGQPENNYKTTPPVLDSDGSFFLYSKLTVDKSRWQQGNVFSCSVMHEALHNHYTQKSLSLSPGKKDPKFWVLVVVGGVLACYSLLVTVAFIIFWVRSKRSRLLHSDYMNMTPRRPGPTRKHYQPYAPPRDFAAYRSRDQRLPPDAHKPPGGGSFRTPIQEEQADAHSTLAKIRVKFSRSADAPAYQQGQNQLYNELNLGRREEYDVLDKRRGRDPEMGGKPRRKNPQEGLYNELQKDKMAEAYSEIGMKGERRRGKGHDGLYQGLSTATKDTYDALHMQALPPR

SEQ ID NO: 1417 - protein, 650 aa, Artificial Sequence
  source: /note="Description of Artificial Sequence: Synthetic Chimeric Antigen Receptor sequence"
QVQLQQSGPELVRPGTFVKISCKASGYTFTNYDINWVNQRPGQGLEWIGWIYPGDGSTKYNEKFKAKATLTADKSSSTAYLQLNNLTSENSAVYFCASGYEDAMDYWGQGTSVTVSSGGGGSGGGGSGGGGSDIKMTQSPSSMYASLGERVIINCKASQDINSYLSWFQQKPGKSPKTLIYRANRLVDGVPSRFSGSGSGQDYSLTISSLEYEDMGIYYCLQYDEFPLTFGAGTKLELKREPKSPDKTHTCPPCPAPPVAGPSVFLFPPKPKDTLMIARTPEVTCVVVDVSHEDPEVKFNWYVDGVEVHNAKTKPREEQYNSTYRVVSVLTVLHQDWLNGKEYKCKVSNKALPAPIEKTISKAKGQPREPQVYTLPPSRDELTKNQVSLTCLVKGFYPSDIAVEWESNGQPENNYKTTPPVLDSDGSFFLYSKLTVDKSRWQQGNVFSCSVMHEALHNHYTQKSLSLSPGKIISFFLALTSTALLFLLFFLTLRFSVVKRGRKKLLYIFKQPFMRPVQTTQEEDGCSCRFPEEEEGGCELRVKFSRSADAPAYQQGQNQLYNELNLGRREEYDVLDKRRGRDPEMGGKPRRKNPQEGLYNELQKDKMAEAYSEIGMKGERRRGKGHDGLYQGLSTATKDTYDALHMQALP

SEQ ID NO: 1418 - protein, 676 aa, Artificial Sequence
  source: /note="Description of Artificial Sequence: Synthetic Chimeric Antigen Receptor sequence"
MALPVTALLLPLALLLHAARPQVQLVQSGAEVKKPGASVKVSCKASGYSFPDYYINWVRQAPGQGLEWMGWIYFASGNSEYNQKFTGRVTMTRDTSINTAYMELSSLTSEDTAVYFCASLYDYDWYFDVWGQGTMVTVSSGGGGSGGGGSGGGGSDIVMTQTPLSLSVTPGQPASISCKSSQSLVHSNGNTYLHWYLQKPGQSPQLLIYKVSNRFSGVPDRFSGSGSGTDFTLKISRVEAEDVGIYYCSQSSIYPWTFGQGTKLEIKEPKSPDKTHTCPPCPAPPVAGPSVFLFPPKPKDTLMIARTPEVTCVVVDVSHEDPEVKFNWYVDGVEVHNAKTKPREEQYNSTYRVVSVLTVLHQDWLNGKEYKCKVSNKALPAPIEKTISKAKGQPREPQVYTLPPSRDELTKNQVSLTCLVKGFYPSDIAVEWESNGQPENNYKTTPPVLDSDGSFFLYSKLTVDKSRWQQGNVFSCSVMHEALHNHYTQKSLSLSPGKIYIWAPLAGTCGVLLLSLVITLYCKRGRKKLLYIFKQPFMRPVQTTQEEDGCSCRFPEEEEGGCELRVKFSRSADAPAYQQGQNQLYNELNLGRREEYDVLDKRRGRDPEMGGKPRRKNPQEGLYNELQKDKMAEAYSEIGMKGERRRGKGHDGLYQGLSTATKDTYDALHMQALPPR

SEQ ID NO: 1419 - protein, 676 aa, Artificial Sequence
  source: /note="Description of Artificial Sequence: Synthetic Chimeric Antigen Receptor sequence"
MALPVTALLLPLALLLHAARPQVQLVQSGAEVKKPGASVKVSCKASGYSFPDYYINWVRQAPGQGLEWMGWIYFASGNSEYNQKFTGRVTMTRDTSSSTAYMELSSLRSEDTAVYFCASLYDYDWYFDVWGQGTMVTVSSGGGGSGGGGSGGGGSDIVMTQTPLSLSVTPGEPASISCKSSQSLVHSNGNTYLHWYLQKPGQSPQLLIYKVSNRFSGVPDRFSGSGSGADFTLKISRVEAEDVGVYYCAETSHVPWTFGQGTKLEIKEPKSPDKTHTCPPCPAPPVAGPSVFLFPPKPKDTLMIARTPEVTCVVVDVSHEDPEVKFNWYVDGVEVHNAKTKPREEQYNSTYRVVSVLTVLHQDWLNGKEYKCKVSNKALPAPIEKTISKAKGQPREPQVYTLPPSRDELTKNQVSLTCLVKGFYPSDIAVEWESNGQPENNYKTTPPVLDSDGSFFLYSKLTVDKSRWQQGNVFSCSVMHEALHNHYTQKSLSLSPGKIYIWAPLAGTCGVLLLSLVITLYCKRGRKKLLYIFKQPFMRPVQTTQEEDGCSCRFPEEEEGGCELRVKFSRSADAPAYQQGQNQLYNELNLGRREEYDVLDKRRGRDPEMGGKPRRKNPQEGLYNELQKDKMAEAYSEIGMKGERRRGKGHDGLYQGLSTATKDTYDALHMQALPPR

SEQ ID NO: 1420 - protein, 679 aa, Artificial Sequence
  source: /note="Description of Artificial Sequence: Synthetic Chimeric Antigen Receptor sequence"
MALPVTALLLPLALLLHAARPQVQLVQSGAEVKKPGASVKVSCKASGYSFPDYYINWVRQAPGQGLEWMGWIYFASGNSEYNQKFTGRVTMTRDTSINTAYMELSSLTSEDTAVYFCASLYDYDWYFDVWGQGTMVTVSSGGGGSGGGGSGGGGSDIVMTQTPLSLSVTPGQPASISCKSSQSLVHSNGNTYLHWYLQKPGQSPQLLIYKVSNRFSGVPDRFSGSGSGTDFTLKISRVEAEDVGIYYCSQSSIYPWTFGQGTKLEIKEPKSPDKTHTCPPCPAPPVAGPSVFLFPPKPKDTLMIARTPEVTCVVVDVSHEDPEVKFNWYVDGVEVHNAKTKPREEQYNSTYRVVSVLTVLHQDWLNGKEYKCKVSNKALPAPIEKTISKAKGQPREPQVYTLPPSRDELTKNQVSLTCLVKGFYPSDIAVEWESNGQPENNYKTTPPVLDSDGSFFLYSKLTVDKSRWQQGNVFSCSVMHEALHNHYTQKSLSLSPGKIISFFLALTSTALLFLLFFLTLRFSVVKRGRKKLLYIFKQPFMRPVQTTQEEDGCSCRFPEEEEGGCELRVKFSRSADAPAYQQGQNQLYNELNLGRREEYDVLDKRRGRDPEMGGKPRRKNPQEGLYNELQKDKMAEAYSEIGMKGERRRGKGHDGLYQGLSTATKDTYDALHMQALPPR

SEQ ID NO: 1421 - protein, 679 aa, Artificial Sequence
  source: /note="Description of Artificial Sequence: Synthetic Chimeric Antigen Receptor sequence"
MALPVTALLLPLALLLHAARPQVQLVQSGAEVKKPGASVKVSCKASGYSFPDYYINWVRQAPGQGLEWMGWIYFASGNSEYNQKFTGRVTMTRDTSSSTAYMELSSLRSEDTAVYFCASLYDYDWYFDVWGQGTMVTVSSGGGGSGGGGSGGGGSDIVMTQTPLSLSVTPGEPASISCKSSQSLVHSNGNTYLHWYLQKPGQSPQLLIYKVSNRFSGVPDRFSGSGSGADFTLKISRVEAEDVGVYYCAETSHVPWTFGQGTKLEIKEPKSPDKTHTCPPCPAPPVAGPSVFLFPPKPKDTLMIARTPEVTCVVVDVSHEDPEVKFNWYVDGVEVHNAKTKPREEQYNSTYRVVSVLTVLHQDWLNGKEYKCKVSNKALPAPIEKTISKAKGQPREPQVYTLPPSRDELTKNQVSLTCLVKGFYPSDIAVEWESNGQPENNYKTTPPVLDSDGSFFLYSKLTVDKSRWQQGNVFSCSVMHEALHNHYTQKSLSLSPGKIISFFLALTSTALLFLLFFLTLRFSVVKRGRKKLLYIFKQPFMRPVQTTQEEDGCSCRFPEEEEGGCELRVKFSRSADAPAYQQGQNQLYNELNLGRREEYDVLDKRRGRDPEMGGKPRRKNPQEGLYNELQKDKMAEAYSEIGMKGERRRGKGHDGLYQGLSTATKDTYDALHMQALPPR

SEQ ID NO: 1422 - protein, 493 aa, Artificial Sequence
  source: /note="Description of Artificial Sequence: Synthetic Chimeric Antigen Receptor sequence"
MALPVTALLLPLALLLHAARPQVQLVQSGAEVRKTGASVKVSCKASGYIFDNFGINWVRQAPGQGLEWMGWINPKNNNTNYAQKFQGRVTITADESTNTAYMEVSSLRSEDTAVYYCARGPYYYQSYMDVWGQGTMVTVSSASGGGGSGGRASGGGGSDIVMTQTPLSLPVTPGEPASISCRSSQSLLHSNGYNYLNWYLQKPGQSPQLLIYLGSKRASGVPDRFSGSGSGTDFTLHITRVGAEDVGVYYCMQALQTPYTFGQGTKLEIKTTTPAPRPPTPAPTIASQPLSLRPEACRPAAGGAVHTRGLDFACDIYIWAPLAGTCGVLLLSLVITLYCKRGRKKLLYIFKQPFMRPVQTTQEEDGCSCRFPEEEEGGCELRVKFSRSADAPAYKQGQNQLYNELNLGRREEYDVLDKRRGRDPEMGGKPRRKNPQEGLYNELQKDKMAEAYSEIGMKGERRRGKGHDGLYQGLSTATKDTYDALHMQALPPR

SEQ ID NO: 1423 - protein, 490 aa, Artificial Sequence
  source: /note="Description of Artificial Sequence: Synthetic Chimeric Antigen Receptor sequence"
MALPVTALLLPLALLLHAARPQVQLQESGGGLVQPGGSLRLSCAASGFTFSSDAMTWVRQAPGKGLEWVSVISGSGGTTYYADSVKGRFTISRDNSKNTLYLQMNSLRAEDTAVYYCAKLDSSGYYYARGPRYWGQGTLVTVSSASGGGGSGGRASGGGGSDIQLTQSPSSLSASVGDRVTITCRASQSISSYLNWYQQKPGKAPKLLIYGASTLASGVPARFSGSGSGTHFTLTINSLQSEDSATYYCQQSYKRASFGQGTKVEIKTTTPAPRPPTPAPTIASQPLSLRPEACRPAAGGAVHTRGLDFACDIYIWAPLAGTCGVLLLSLVITLYCKRGRKKLLYIFKQPFMRPVQTTQEEDGCSCRFPEEEEGGCELRVKFSRSADAPAYKQGQNQLYNELNLGRREEYDVLDKRRGRDPEMGGKPRRKNPQEGLYNELQKDKMAEAYSEIGMKGERRRGKGHDGLYQGLSTATKDTYDALHMQALPPR

SEQ ID NO: 1424 - protein, 491 aa, Artificial Sequence
  source: /note="Description of Artificial Sequence: Synthetic Chimeric Antigen Receptor sequence"
MALPVTALLLPLALLLHAARPQVQLVQSGAEVKKPGASVKVSCKASGYTFSNYGITWVRQAPGQGLEWMGWISAYNGNTNYAQKFQGRVTMTRNTSISTAYMELSSLRSEDTAVYYCARGPYYYYMDVWGKGTMVTVSSASGGGGSGGRASGGGGSEIVMTQSPLSLPVTPGEPASISCRSSQSLLYSNGYNYVDWYLQKPGQSPQLLIYLGSNRASGVPDRFSGSGSGTDFKLQISRVEAEDVGIYYCMQGRQFPYSFGQGTKVEIKTTTPAPRPPTPAPTIASQPLSLRPEACRPAAGGAVHTRGLDFACDIYIWAPLAGTCGVLLLSLVITLYCKRGRKKLLYIFKQPFMRPVQTTQEEDGCSCRFPEEEEGGCELRVKFSRSADAPAYKQGQNQLYNELNLGRREEYDVLDKRRGRDPEMGGKPRRKNPQEGLYNELQKDKMAEAYSEIGMKGERRRGKGHDGLYQGLSTATKDTYDALHMQALPPR

SEQ ID NO: 1425 - protein, 490 aa, Artificial Sequence
  source: /note="Description of Artificial Sequence: Synthetic Chimeric Antigen Receptor sequence"
MALPVTALLLPLALLLHAARPQVQLVESGGGLVQPGRSLRLSCAASGFTFSNYAMSWVRQAPGKGLGWVSGISRSGENTYYADSVKGRFTISRDNSKNTLYLQMNSLRDEDTAVYYCARSPAHYYGGMDVWGQGTTVTVSSASGGGGSGGRASGGGGSDIVLTQSPGTLSLSPGERATLSCRASQSISSSFLAWYQQKPGQAPRLLIYGASRRATGIPDRFSGSGSGTDFTLTISRLEPEDSAVYYCQQYHSSPSWTFGQGTKLEIKTTTPAPRPPTPAPTIASQPLSLRPEACRPAAGGAVHTRGLDFACDIYIWAPLAGTCGVLLLSLVITLYCKRGRKKLLYIFKQPFMRPVQTTQEEDGCSCRFPEEEEGGCELRVKFSRSADAPAYKQGQNQLYNELNLGRREEYDVLDKRRGRDPEMGGKPRRKNPQEGLYNELQKDKMAEAYSEIGMKGERRRGKGHDGLYQGLSTATKDTYDALHMQALPPR

SEQ ID NO: 1426 - protein, 488 aa, Artificial Sequence
  source: /note="Description of Artificial Sequence: Synthetic Chimeric Antigen Receptor sequence"
MALPVTALLLPLALLLHAARPQVQLVESGGGLVQPGRSLRLSCAASGFTFDDYAMHWVRQAPGKGLEWVSGISWNSGSIGYADSVKGRFTISRDNAKNSLYLQMNSLRAEDTALYYCSVHSFLAYWGQGTLVTVSSASGGGGSGGRASGGGGSDIVMTQTPLSLPVTPGEPASISCRSSQSLLHSNGYNYLDWYLQKPGQSPQLLIYLGSNRASGVPDRFSGSGSGTDFTLKISRVEAEDVGVYYCMQALQTPYTFGQGTKVEIKTTTPAPRPPTPAPTIASQPLSLRPEACRPAAGGAVHTRGLDFACDIYIWAPLAGTCGVLLLSLVITLYCKRGRKKLLYIFKQPFMRPVQTTQEEDGCSCRFPEEEEGGCELRVKFSRSADAPAYKQGQNQLYNELNLGRREEYDVLDKRRGRDPEMGGKPRRKNPQEGLYNELQKDKMAEAYSEIGMKGERRRGKGHDGLYQGLSTATKDTYDALHMQALPPR

SEQ ID NO: 1427 - protein, 483 aa, Artificial Sequence; identical to SEQ ID NO: 1351
  source: /note="Description of Artificial Sequence: Synthetic Chimeric Antigen Receptor sequence"

SEQ ID NO: 1428 - protein, 485 aa, Artificial Sequence; identical to SEQ ID NO: 1355
  source: /note="Description of Artificial Sequence: Synthetic Chimeric Antigen Receptor sequence"

SEQ ID NO: 1429 - protein, 483 aa, Artificial Sequence
  source: /note="Description of Artificial Sequence: Synthetic Chimeric Antigen Receptor sequence"
MALPVTALLLPLALLLHAARPQVQLVESGGGLVKPGGSLRLSCAASGFTFSDYYMSWIRQAPGKGLEWVSYISSSGSTIYYADSVKGRFTISRDNAKNSLYLQMNSLRAEDTAVYYCARESGDGMDVWGQGTTVTVSSASGGGGSGGRASGGGGSDIQMTQSPSSLSASVGDRVTITCRASQSISSYLNWYQQKPGKAPKLLIYAASSLQSGVPSRFSGSGSGTDFTLTISSLQPEDFATYYCQQSYTLAFGQGTKVDIKTTTPAPRPPTPAPTIASQPLSLRPEACRPAAGGAVHTRGLDFACDIYIWAPLAGTCGVLLLSLVITLYCKRGRKKLLYIFKQPFMRPVQTTQEEDGCSCRFPEEEEGGCELRVKFSRSADAPAYKQGQNQLYNELNLGRREEYDVLDKRRGRDPEMGGKPRRKNPQEGLYNELQKDKMAEAYSEIGMKGERRRGKGHDGLYQGLSTATKDTYDALHMQALPPR

SEQ ID NO: 1430 - protein, 490 aa, Artificial Sequence
  source: /note="Description of Artificial Sequence: Synthetic Chimeric Antigen Receptor sequence"
MALPVTALLLPLALLLHAARPQVQLVQSGGGLVKPGGSLRLSCAASGFTFSDYYMSWIRQAPGKGLEWVSYISSSGNTIYYADSVKGRFTISRDNAKNSLYLQMNSLRAEDTAVYYCARSTMVREDYWGQGTLVTVSSASGGGGSGGRASGGGGSDIVLTQSPLSLPVTLGQPASISCKSSESLVHNSGKTYLNWFHQRPGQSPRRLIYEVSNRDSGVPDRFTGSGSGTDFTLKISRVEAEDVGVYYCMQGTHWPGTFGQGTKLEIKTTTPAPRPPTPAPTIASQPLSLRPEACRPAAGGAVHTRGLDFACDIYIWAPLAGTCGVLLLSLVITLYCKRGRKKLLYIFKQPFMRPVQTTQEEDGCSCRFPEEEEGGCELRVKFSRSADAPAYKQGQNQLYNELNLGRREEYDVLDKRRGRDPEMGGKPRRKNPQEGLYNELQKDKMAEAYSEIGMKGERRRGKGHDGLYQGLSTATKDTYDALHMQALPPR

SEQ ID NO: 1431 - protein, 487 aa, Artificial Sequence
  source: /note="Description of Artificial Sequence: Synthetic Chimeric Antigen Receptor sequence"
MALPVTALLLPLALLLHAARPEVQLLESGGGLVQPGGSLRLSCAVSGFALSNHGMSWVRRAPGKGLEWVSGIVYSGSTYYAASVKGRFTISRDNSRNTLYLQMNSLRPEDTAIYYCSAHGGESDVWGQGTTVTVSSASGGGGSGGRASGGGGSDIVMTQTPLSLSVTPGQPASISCKSSQSLLRNDGKTPLYWYLQKAGQPPQLLIYEVSNRFSGVPDRFSGSGSGTDFTLKISRVEAEDVGAYYCMQNIQFPSFGGGTKLEIKTTTPAPRPPTPAPTIASQPLSLRPEACRPAAGGAVHTRGLDFACDIYIWAPLAGTCGVLLLSLVITLYCKRGRKKLLYIFKQPFMRPVQTTQEEDGCSCRFPEEEEGGCELRVKFSRSADAPAYKQGQNQLYNELNLGRREEYDVLDKRRGRDPEMGGKPRRKNPQEGLYNELQKDKMAEAYSEIGMKGERRRGKGHDGLYQGLSTATKDTYDALHMQALPPR

SEQ ID NO: 1432 - protein, 483 aa, Artificial Sequence
  source: /note="Description of Artificial Sequence: Synthetic Chimeric Antigen Receptor sequence"
MALPVTALLLPLALLLHAARPQVQLVESGGGLVQPGGSLRLSCAVSGFALSNHGMSWVRRAPGKGLEWVSGIVYSGSTYYAASVKGRFTISRDNSRNTLYLQMNSLRPEDTAIYYCSAHGGESDVWGQGTTVTVSSASGGGGSGGRASGGGGSDIRLTQSPSPLSASVGDRVTITCQASEDINKFLNWYHQTPGKAPKLLIYDASTLQTGVPSRFSGSGSGTDFTLTINSLQPEDIGTYYCQQYESLPLTFGGGTKVEIKTTTPAPRPPTPAPTIASQPLSLRPEACRPAAGGAVHTRGLDFACDIYIWAPLAGTCGVLLLSLVITLYCKRGRKKLLYIFKQPFMRPVQTTQEEDGCSCRFPEEEEGGCELRVKFSRSADAPAYKQGQNQLYNELNLGRREEYDVLDKRRGRDPEMGGKPRRKNPQEGLYNELQKDKMAEAYSEIGMKGERRRGKGHDGLYQGLSTATKDTYDALHMQALPPR

SEQ ID NO: 1433 - protein, 484 aa, Artificial Sequence
  source: /note="Description of Artificial Sequence: Synthetic Chimeric Antigen Receptor sequence"
MALPVTALLLPLALLLHAARPEVQLVETGGGLVQPGGSLRLSCAVSGFALSNHGMSWVRRAPGKGLEWVSGIVYSGSTYYAASVKGRFTISRDNSRNTLYLQMNSLRPEDTAIYYCSAHGGESDVWGQGTTVTVSSASGGGGSGGRASGGGGSETTLTQSPATLSVSPGERATLSCRASQSVGSNLAWYQQKPGQGPRLLIYGASTRATGIPARFSGSGSGTEFTLTISSLQPEDFAVYYCQQYNDWLPVTFGQGTKVEIKTTTPAPRPPTPAPTIASQPLSLRPEACRPAAGGAVHTRGLDFACDIYIWAPLAGTCGVLLLSLVITLYCKRGRKKLLYIFKQPFMRPVQTTQEEDGCSCRFPEEEEGGCELRVKFSRSADAPAYKQGQNQLYNELNLGRREEYDVLDKRRGRDPEMGGKPRRKNPQEGLYNELQKDKMAEAYSEIGMKGERRRGKGHDGLYQGLSTATKDTYDALHMQALPPR

SEQ ID NO: 1434 - protein, 485 aa, Artificial Sequence
  source: /note="Description of Artificial Sequence: Synthetic Chimeric Antigen Receptor sequence"
MALPVTALLLPLALLLHAARPEVQLVESGGGLVQPGGSLRLSCAVSGFALSNHGMSWVRRAPGKGLEWVSGIVYSGSTYYAASVKGRFTISRDNSRNTLYLQMNSLRPEDTAIYYCSAHGGESDVWGQGTTVTVSSASGGGGSGGRASGGGGSEIVLTQSPGTLSLSPGERATLSCRASQSIGSSSLAWYQQKPGQAPRLLMYGASSRASGIPDRFSGSGSGTDFTLTISRLEPEDFAVYYCQQYAGSPPFTFGQGTKVEIKTTTPAPRPPTPAPTIASQPLSLRPEACRPAAGGAVHTRGLDFACDIYIWAPLAGTCGVLLLSLVITLYCKRGRKKLLYIFKQPFMRPVQTTQEEDGCSCRFPEEEEGGCELRVKFSRSADAPAYKQGQNQLYNELNLGRREEYDVLDKRRGRDPEMGGKPRRKNPQEGLYNELQKDKMAEAYSEIGMKGERRRGKGHDGLYQGLSTATKDTYDALHMQALPPR

SEQ ID NO: 1435 - protein, 487 aa, Artificial Sequence
  source: /note="Description of Artificial Sequence: Synthetic Chimeric Antigen Receptor sequence"
MALPVTALLLPLALLLHAARPQVQLQESGPGLVKPSETLSLTCTVSGGSISSSYYYWGWIRQPPGKGLEWIGSIYYSGSAYYNPSLKSRVTISVDTSKNQFSLRLSSVTAADTAVYYCARHWQEWPDAFDIWGQGTMVTVSSGGGGSGGGGSGGGGSETTLTQSPAFMSATPGDKVIISCKASQDIDDAMNWYQQKPGEAPLFIIQSATSPVPGIPPRFSGSGFGTDFSLTINNIESEDAAYYFCLQHDNFPLTFGQGTKLEIKTTTPAPRPPTPAPTIASQPLSLRPEACRPAAGGAVHTRGLDFACDIYIWAPLAGTCGVLLLSLVITLYCKRGRKKLLYIFKQPFMRPVQTTQEEDGCSCRFPEEEEGGCELRVKFSRSADAPAYKQGQNQLYNELNLGRREEYDVLDKRRGRDPEMGGKPRRKNPQEGLYNELQKDKMAEAYSEIGMKGERRRGKGHDGLYQGLSTATKDTYDALHMQALPPR

SEQ ID NO: 1436 - protein, 489 aa, Artificial Sequence
  source: /note="Description of Artificial Sequence: Synthetic Chimeric Antigen Receptor sequence"
MALPVTALLLPLALLLHAARPQVNLRESGPALVKPTQTLTLTCTFSGFSLRTSGMCVSWIRQPPGKALEWLARIDWDEDKFYSTSLKTRLTISKDTSDNQVVLRMTNMDPADTATYYCARSGAGGTSATAFDIWGPGTMVTVSSGGGGSGGGGSGGGGSDIQMTQSPSSLSASVGDRVTITCRASQDIYNNLAWFQLKPGSAPRSLMYAANKSQSGVPSRFSGSASGTDFTLTISSLQPEDFATYYCQHYYRFPYSFGQGTKLEIKTTTPAPRPPTPAPTIASQPLSLRPEACRPAAGGAVHTRGLDFACDIYIWAPLAGTCGVLLLSLVITLYCKRGRKKLLYIFKQPFMRPVQTTQEEDGCSCRFPEEEEGGCELRVKFSRSADAPAYKQGQNQLYNELNLGRREEYDVLDKRRGRDPEMGGKPRRKNPQEGLYNELQKDKMAEAYSEIGMKGERRRGKGHDGLYQGLSTATKDTYDALHMQALPPR

SEQ ID NO: 1437 - protein, 490 aa, Artificial Sequence
  source: /note="Description of Artificial Sequence: Synthetic Chimeric Antigen Receptor sequence"
MALPVTALLLPLALLLHAARPEVQLVESGGGLVKPGGSLRLSCAASGFTFSSYSMNWVRQAPGKGLEWVSSISSSSSYIYYADSVKGRFTISRDNAKNSLYLQMNSLRAEDTAVYYCAKTIAAVYAFDIWGQGTTVTVSSGGGGSGGGGSGGGGSEIVLTQSPLSLPVTPEEPASISCRSSQSLLHSNGYNYLDWYLQKPGQSPQLLIYLGSNRASGVPDRFSGSGSGTDFTLKISRVEAEDVGVYYCMQALQTPYTFGQGTKLEIKTTTPAPRPPTPAPTIASQPLSLRPEACRPAAGGAVHTRGLDFACDIYIWAPLAGTCGVLLLSLVITLYCKRGRKKLLYIFKQPFMRPVQTTQEEDGCSCRFPEEEEGGCELRVKFSRSADAPAYKQGQNQLYNELNLGRREEYDVLDKRRGRDPEMGGKPRRKNPQEGLYNELQKDKMAEAYSEIGMKGERRRGKGHDGLYQGLSTATKDTYDALHMQALPPR

SEQ ID NO: 1438 - protein, 484 aa, Artificial Sequence
  source: /note="Description of Artificial Sequence: Synthetic Chimeric Antigen Receptor sequence"
MALPVTALLLPLALLLHAARPEVQLVESGGGLVKPGGSLRLSCAASGFTFSDYYMSWIRQAPGKGLEWVSYISSSGSTIYYADSVKGRFTISRDNAKNSLYLQMNSLRAEDTAVYYCARDLRGAFDIWGQGTMVTVSSGGGGSGGGGSGGGGSSYVLTQSPSVSAAPGYTATISCGGNNIGTKSVHWYQQKPGQAPLLVIRDDSVRPSKIPGRFSGSNSGNMATLTISGVQAGDEADFYCQVWDSDSEHVVFGGGTKLTVLTTTPAPRPPTPAPTIASQPLSLRPEACRPAAGGAVHTRGLDFACDIYIWAPLAGTCGVLLLSLVITLYCKRGRKKLLYIFKQPFMRPVQTTQEEDGCSCRFPEEEEGGCELRVKFSRSADAPAYKQGQNQLYNELNLGRREEYDVLDKRRGRDPEMGGKPRRKNPQEGLYNELQKDKMAEAYSEIGMKGERRRGKGHDGLYQGLSTATKDTYDALHMQALPPR

SEQ ID NO: 1439 - protein, 485 aa, Artificial Sequence; identical to SEQ ID NO: 1356
  source: /note="Description of Artificial Sequence: Synthetic Chimeric Antigen Receptor sequence"

SEQ ID NO: 1440 - protein, 489 aa, Artificial Sequence
  source: /note="Description of Artificial Sequence: Synthetic Chimeric Antigen Receptor sequence"
MALPVTALLLPLALLLHAARPQVQLQESGPGLVKPSQTLSLTCTVSGGSISSGGYYWSWIRQHPGKGLEWIGYIYYSGSTYYNPSLKSRVTISVDTSKNQFSLKLSSVTAADTAVYYCARAGIAARLRGAFDIWGQGTMVTVSSGGGGSGGGGSGGGGSDIVMTQSPSSVSASVGDRVIITCRASQGIRNWLAWYQQKPGKAPNLLIYAASNLQSGVPSRFSGSGSGADFTLTISSLQPEDVATYYCQKYNSAPFTFGPGTKVDIKTTTPAPRPPTPAPTIASQPLSLRPEACRPAAGGAVHTRGLDFACDIYIWAPLAGTCGVLLLSLVITLYCKRGRKKLLYIFKQPFMRPVQTTQEEDGCSCRFPEEEEGGCELRVKFSRSADAPAYKQGQNQLYNELNLGRREEYDVLDKRRGRDPEMGGKPRRKNPQEGLYNELQKDKMAEAYSEIGMKGERRRGKGHDGLYQGLSTATKDTYDALHMQALPPR

SEQ ID NO: 1441 - protein, 497 aa, Artificial Sequence
  source: /note="Description of Artificial Sequence: Synthetic Chimeric Antigen Receptor sequence"
MALPVTALLLPLALLLHAARPQVQLVQSGAEVKKPGSSVKVSCKASGGTFSSYAISWVRQAPGQGLEWMGGIIPIFGTANYAQKFQGRVTITADESTSTAYMELSSLRSEDTAVYYCARRGGYQLLRWDVGLLRSAFDIWGQGTMVTVSSGGGGSGGGGSGGGGSSYVLTQPPSVSVAPGQTARITCGGNNIGSKSVHWYQQKPGQAPVLVLYGKNNRPSGVPDRFSGSRSGTTASLTITGAQAEDEADYYCSSRDSSGDHLRVFGTGTKVTVLTTTPAPRPPTPAPTIASQPLSLRPEACRPAAGGAVHTRGLDFACDIYIWAPLAGTCGVLLLSLVITLYCKRGRKKLLYIFKQPFMRPVQTTQEEDGCSCRFPEEEEGGCELRVKFSRSADAPAYKQGQNQLYNELNLGRREEYDVLDKRRGRDPEMGGKPRRKNPQEGLYNELQKDKMAEAYSEIGMKGERRRGKGHDGLYQGLSTATKDTYDALHMQALPPR

SEQ ID NO: 1442 - protein, 492 aa, Artificial Sequence
  source: /note="Description of Artificial Sequence: Synthetic Chimeric Antigen Receptor sequence"
MALPVTALLLPLALLLHAARPEVQLQQSGPGLVKPSQTLSLTCAISGDSVSSNSAAWNWIRQSPSRGLEWLGRTYYRSKWYSFYAISLKSRIIINPDTSKNQFSLQLKSVTPEDTAVYYCARSSPEGLFLYWFDPWGQGTLVTVSSGGDGSGGGGSGGGGSSSELTQDPAVSVALGQTIRITCQGDSLGNYYATWYQQKPGQAPVLVIYGTNNRPSGIPDRFSASSSGNTASLTITGAQAEDEADYYCNSRDSSGHHLLFGTGTKVTVLTTTPAPRPPTPAPTIASQPLSLRPEACRPAAGGAVHTRGLDFACDIYIWAPLAGTCGVLLLSLVITLYCKRGRKKLLYIFKQPFMRPVQTTQEEDGCSCRFPEEEEGGCELRVKFSRSADAPAYKQGQNQLYNELNLGRREEYDVLDKRRGRDPEMGGKPRRKNPQEGLYNELQKDKMAEAYSEIGMKGERRRGKGHDGLYQGLSTATKDTYDALHMQALPPR

SEQ ID NO: 1443 - protein, 483 aa, Artificial Sequence
  source: /note="Description of Artificial Sequence: Synthetic Chimeric Antigen Receptor sequence"
MALPVTALLLPLALLLHAARPEVQLVETGGGLVQPGRSLRLSCAASGFTFDDYAMHWVRQAPGKGLEWVSGISWNSGSIGYADSVKGRFTISRDNAKNSLYLQMNSLRDEDTAVYYCARVGKAVPDVWGQGTTVTVSSGGGGSGGGGSGGGGSDIVMTQTPSSLSASVGDRVTITCRASQSISSYLNWYQQKPGKAPKLLIYAASSLQSGVPSRFSGSGSGTDFTLTISSLQPEDFATYYCQQSYSTPYSFGQGTRLEIKTTTPAPRPPTPAPTIASQPLSLRPEACRPAAGGAVHTRGLDFACDIYIWAPLAGTCGVLLLSLVITLYCKRGRKKLLYIFKQPFMRPVQTTQEEDGCSCRFPEEEEGGCELRVKFSRSADAPAYKQGQNQLYNELNLGRREEYDVLDKRRGRDPEMGGKPRRKNPQEGLYNELQKDKMAEAYSEIGMKGERRRGKGHDGLYQGLSTATKDTYDALHMQALPPR

SEQ ID NO: 1444 - protein, 488 aa, Artificial Sequence
  source: /note="Description of Artificial Sequence: Synthetic Chimeric Antigen Receptor sequence"
MALPVTALLLPLALLLHAARPEVQLLETGGGLVQPGGSLRLSCAASGFSFSSYAMSWVRQAPGKGLEWVSAISGSGGSTYYADSVKGRFTISRDNSKNTLYLQMNSLRAEDTAVYYCAKALVGATGAFDIWGQGTLVTVSSGGGGSGGGGSGGGGSEIVLTQSPGTLSLSPGERATLSCRASQSLSSNFLAWYQQKPGQAPGLLIYGASNWATGTPDRFSGSGSGTDFTLTITRLEPEDFAVYYCQYYGTSPMYTFGQGTKVEIKTTTPAPRPPTPAPTIASQPLSLRPEACRPAAGGAVHTRGLDFACDIYIWAPLAGTCGVLLLSLVITLYCKRGRKKLLYIFKQPFMRPVQTTQEEDGCSCRFPEEEEGGCELRVKFSRSADAPAYKQGQNQLYNELNLGRREEYDVLDKRRGRDPEMGGKPRRKNPQEGLYNELQKDKMAEAYSEIGMKGERRRGKGHDGLYQGLSTATKDTYDALHMQALPPR

SEQ ID NO: 1445 - protein, 492 aa, Artificial Sequence; identical to SEQ ID NO: 1374
  source: /note="Description of Artificial Sequence: Synthetic Chimeric Antigen Receptor sequence"

SEQ ID NO: 1446 - protein, 490 aa, Artificial Sequence
  source: /note="Description of Artificial Sequence: Synthetic Chimeric Antigen Receptor sequence"
MALPVTALLLPLALLLHAARPEVQLVESGGGLVQPGGSLRLSCAASGFTFSSYAMSWVRQAPGKGLEWVSAISGSGGSTYYADSVKGRFTISRDNSKNTLYLQMNSLRAEDTAVYYCAKVEGSGSLDYWGQGTLVTVSSGGGGSGGGGSGGGGSEIVMTQSPGTLSLSPGERATLSCRASQSVSSAYLAWYQQKPGQPPRLLISGASTRATGIPDRFGGSGSGTDFTLTISRLEPEDFAVYYCQHYGSSFNGSSLFTFGQGTRLEIKTTTPAPRPPTPAPTIASQPLSLRPEACRPAAGGAVHTRGLDFACDIYIWAPLAGTCGVLLLSLVITLYCKRGRKKLLYIFKQPFMRPVQTTQEEDGCSCRFPEEEEGGCELRVKFSRSADAPAYKQGQNQLYNELNLGRREEYDVLDKRRGRDPEMGGKPRRKNPQEGLYNELQKDKMAEAYSEIGMKGERRRGKGHDGLYQGLSTATKDTYDALHMQALPPR

SEQ ID NO: 1447 - protein, 485 aa, Artificial Sequence; identical to SEQ ID NO: 1354
  source: /note="Description of Artificial Sequence: Synthetic Chimeric Antigen Receptor sequence"

SEQ ID NO: 1448 - protein, 490 aa, Artificial Sequence
  source: /note="Description of Artificial Sequence: Synthetic Chimeric Antigen Receptor sequence"
MALPVTALLLPLALLLHAARPEVQLVESGGGLVQPGGSLRLSCAASGFTFSSYAMSWVRQAPGKGLEWVSAISGSGGSTYYADSVKGRFTISRDNSKNTLYLQMNSLRAEDTAVYYCAKMGWSSGYLGAFDIWGQGTTVTVSSGGGGSGGGGSGGGGSEIVLTQSPGTLSLSPGERATLSCRASQSVASSFLAWYQQKPGQAPRLLIYGASGRATGIPDRFSGSGSGTDFTLTISRLEPEDFAVYYCQHYGGSPRLTFGGGTKVDIKTTTPAPRPPTPAPTIASQPLSLRPEACRPAAGGAVHTRGLDFACDIYIWAPLAGTCGVLLLSLVITLYCKRGRKKLLYIFKQPFMRPVQTTQEEDGCSCRFPEEEEGGCELRVKFSRSADAPAYKQGQNQLYNELNLGRREEYDVLDKRRGRDPEMGGKPRRKNPQEGLYNELQKDKMAEAYSEIGMKGERRRGKGHDGLYQGLSTATKDTYDALHMQALPPR

SEQ ID NO: 1449 - protein, 492 aa, Artificial Sequence
  source: /note="Description of Artificial Sequence: Synthetic Chimeric Antigen Receptor sequence"
MALPVTALLLPLALLLHAARPQVQLVESGGGLVQPGGSLRLSCAASGFTFSSYAMSWVRQAPGKGLEWVSAISGSGGSTYYADSVKGRFTISRDNAKNSLYLQMNSLRAEDTAIYYCARATYKRELRYYYGMDVWGQGTMVTVSSGGGGSGGGGSGGGGSEIVMTQSPGTVSLSPGERATLSCRASQSVSSSFLAWYQQKPGQAPRLLIYGASSRATGIPDRFSGSGSGTDFTLTISRLEPEDSAVYYCQQYHSSPSWTFGQGTRLEIKTTTPAPRPPTPAPTIASQPLSLRPEACRPAAGGAVHTRGLDFACDIYIWAPLAGTCGVLLLSLVITLYCKRGRKKLLYIFKQPFMRPVQTTQEEDGCSCRFPEEEEGGCELRVKFSRSADAPAYKQGQNQLYNELNLGRREEYDVLDKRRGRDPEMGGKPRRKNPQEGLYNELQKDKMAEAYSEIGMKGERRRGKGHDGLYQGLSTATKDTYDALHMQALPPR

SEQ ID NO: 1450 - protein, 490 aa, Artificial Sequence
  source: /note="Description of Artificial Sequence: Synthetic Chimeric Antigen Receptor sequence"
MALPVTALLLPLALLLHAARPEVQLVESGGGLVQPGRSLRLSCTASGFTFDDYAMHWVRQRPGKGLEWVASINWKGNSLAYGDSVKGRFAISRDNAKNTVFLQMNSLRTEDTAVYYCASHQGVAYYNYAMDVWGRGTLVTVSSGGGGSGGGGSGGGGSEIVLTQSPGTLSLSPGERATLSCRATQSIGSSFLAWYQQRPGQAPRLLIYGASQRATGIPDRFSGRGSGTDFTLTISRVEPEDSAVYYCQHYESSPSWTFGQGTKVEIKTTTPAPRPPTPAPTIASQPLSLRPEACRPAAGGAVHTRGLDFACDIYIWAPLAGTCGVLLLSLVITLYCKRGRKKLLYIFKQPFMRPVQTTQEEDGCSCRFPEEEEGGCELRVKFSRSADAPAYKQGQNQLYNELNLGRREEYDVLDKRRGRDPEMGGKPRRKNPQEGLYNELQKDKMAEAYSEIGMKGERRRGKGHDGLYQGLSTATKDTYDALHMQALPPR

SEQ ID NO: 1451 - protein, 486 aa, Artificial Sequence
  source: /note="Description of Artificial Sequence: Synthetic Chimeric Antigen Receptor sequence"
MALPVTALLLPLALLLHAARPEVQLLESGGGLVQPGGSLRLSCAASGFTFSSYAMSWVRQAPGKGLEWVSAISGSGGSTYYADSVKGRFTISRDNSKNTLYLQMNSLRAEDTAVYYCAKIPQTGTFDYWGQGTLVTVSSGGGGSGGGGSGGGGSEIVLTQSPGTLSLSPGERATLSCRASQSVSSSYLAWYQQRPGQAPRLLIYGASSRATGIPDRFSGSGSGTDFTLTISRLEPEDFAVYYCQHYGSSPSWTFGQGTRLEIKTTTPAPRPPTPAPTIASQPLSLRPEACRPAAGGAVHTRGLDFACDIYIWAPLAGTCGVLLLSLVITLYCKRGRKKLLYIFKQPFMRPVQTTQEEDGCSCRFPEEEEGGCELRVKFSRSADAPAYKQGQNQLYNELNLGRREEYDVLDKRRGRDPEMGGKPRRKNPQEGLYNELQKDKMAEAYSEIGMKGERRRGKGHDGLYQGLSTATKDTYDALHMQALPPR

SEQ ID NO: 1452 - protein, 488 aa, Artificial Sequence
  source: /note="Description of Artificial Sequence: Synthetic Chimeric Antigen Receptor sequence"
MALPVTALLLPLALLLHAARPEVQLLESGGGLVQPGGSLRLSCAASGFTFSSYAMSWVRQAPGKGLEWVSAISGSGGSTYYADSVKGRFTISRDNSKNTLYLQMNSLRAEDTAVYYCVLWFGEGFDPWGQGTLVTVSSGGGGSGGGGSGGGGSDIVLTQSPLSLPVTPGEPASISCRSSQSLLHSNGYNYLDWYLQKPGQSPQLLIYLGSNRASGVPDRFSGSGSGTDFTLKISRVEAEDVGVYYCMQALQTPLTFGGGTKVDIKTTTPAPRPPTPAPTIASQPLSLRPEACRPAAGGAVHTRGLDFACDIYIWAPLAGTCGVLLLSLVITLYCKRGRKKLLYIFKQPFMRPVQTTQEEDGCSCRFPEEEEGGCELRVKFSRSADAPAYKQGQNQLYNELNLGRREEYDVLDKRRGRDPEMGGKPRRKNPQEGLYNELQKDKMAEAYSEIGMKGERRRGKGHDGLYQGLSTATKDTYDALHMQALPPR

SEQ ID NO: 1453 - protein, 485 aa, Artificial Sequence; identical to SEQ ID NO: 1353
  source: /note="Description of Artificial Sequence: Synthetic Chimeric Antigen Receptor sequence"

SEQ ID NO: 1454 - protein, 495 aa, Artificial Sequence
  source: /note="Description of Artificial Sequence: Synthetic Chimeric Antigen Receptor sequence"
MALPVTALLLPLALLLHAARPQVQLVESGGGLVQPGGSLRLSCAASGFTFSSYAMSWVRQAPGKGLEWVSAISGSGGSTYYADSVKGRFTISRDNSKNTLYLQMNSLRAEDTAVYYCAKVGYDSSGYYRDYYGMDVWGQGTTVTVSSGGGGSGGGGSGGGGSEIVLTQSPGTLSLSPGERATLSCRASQSVSSSYLAWYQQKPGQAPRLLIYGTSSRATGISDRFSGSGSGTDFTLTISRLEPEDFAVYYCQHYGNSPPKFTFGPGTKLEIKTTTPAPRPPTPAPTIASQPLSLRPEACRPAAGGAVHTRGLDFACDIYIWAPLAGTCGVLLLSLVITLYCKRGRKKLLYIFKQPFMRPVQTTQEEDGCSCRFPEEEEGGCELRVKFSRSADAPAYKQGQNQLYNELNLGRREEYDVLDKRRGRDPEMGGKPRRKNPQEGLYNELQKDKMAEAYSEIGMKGERRRGKGHDGLYQGLSTATKDTYDALHMQALPPR

SEQ ID NO: 1455 - protein, 449 aa, Artificial Sequence
  source: /note="Description of Artificial Sequence: Synthetic Chimeric Antigen Receptor sequence"
EVKLVESGGGLVQPGGSLSLSCAASGFTFTDYYMSWVRQPPGKALEWLALIRSKADGYTTEYSASVKGRFTLSRDDSQSILYLQMNALRPEDSATYYCARDAAYYSYYSPEGAMDYWGQGTSVTVSSGGGGSGGGGSGGGGSMADYKDIVMTQSHKFMSTSVGDRVNITCKASQNVDSAVAWYQQKPGQSPKALIYSASYRYSGVPDRFTGRGSGTDFTLTISSVQAEDLAVYYCQQYYSTPWTFGGGTKLEIKRGLAVSTISSFFPPGYQIYIWAPLAGTCGVLLLSLVITLYCKRGRKKLLYIFKQPFMRPVQTTQEEDGCSCRFPEEEEGGCELRVKFSRSADAPAYQQGQNQLYNELNLGRREEYDVLDKRRGRDPEMGGKPRRKNPQEGLYNELQKDKMAEAYSEIGMKGERRRGKGHDGLYQGLSTATKDTYDALHMQALPPR

SEQ ID NO: 1456 - protein, 424 aa, Artificial Sequence
  source: /note="Description of Artificial Sequence: Synthetic Chimeric Antigen Receptor sequence"
METDTLLLWVLLLWVPGSTGSVLHLVPINATSKDDSDVTEVMWQPALRRGRGLQAQGYGVRIQDAGVYLLYSQVLFQDVTFTMGQVVSREGQGRQETLFRCIRSMPSHPDRAYNSCYSAGVFHLHQGDILSVIIPRARAKLNLSPHGTFLGFVKLSGGGSDPTTTPAPRPPTPAPTIASQPLSLRPEACRPAAGGAVHTRGLDFACDIFWVLVVVGGVLACYSLLVTVAFIIFWVRSKRSRLLHSDYMNMTPRRPGPTRKHYQPYAPPRDFAAYRSRDQRLPPDAHKPPGGGSFRTPIQEEQADAHSTLAKIRVKFSRSADAPAYQQGQNQLYNELNLGRREEYDVLDKRRGRDPEMGGKPRRKNPQEGLYNELQKDKMAEAYSEIGMKGERRRGKGHDGLYQGLSTATKDTYDALHMQALPPR

SEQ ID NO: 1457 - protein, 436 aa, Artificial Sequence
  source: /note="Description of Artificial Sequence: Synthetic Chimeric Antigen Receptor sequence"
EVQLQQSGPELVKPGASVKISCKASGYTFTDYNMHWVKQSHGKSLEWIGYIYPYNGGTGYNQKFKSKATLTVDNSSSTAYMDVRSLTSEDSAVYYCARGRPAMDYWGQGTSVTVSSGGGGSGGGGSGGGGSDIVLTQSPASLAVSLGQRATISCRASESVDNYGISFMNWFQQKPGQPPKLLIYAASNQGSGVPARFSGSGSGTDFSLNIHPMEEDDTAMYFCQQSKEVPWTFGGGTKLEIKGLAVSTISSFFPPGYQIYIWAPLAGTCGVLLLSLVITLYCKRGRKKLLYIFKQPFMRPVQTTQEEDGCSCRFPEEEEGGCELRVKFSRSADAPAYQQGQNQLYNELNLGRREEYDVLDKRRGRDPEMGGKPRRKNPQEGLYNELQKDKMAEAYSEIGMKGERRRGKGHDGLYQGLSTATKDTYDALHMQALPPR

SEQ ID NO: 1458 - protein, 434 aa, Artificial Sequence
  source: /note="Description of Artificial Sequence: Synthetic Chimeric Antigen Receptor sequence"
QVQLQQSGPELVRPGTFVKISCKASGYTFTNYDINWVNQRPGQGLEWIGWIYPGDGSTKYNEKFKAKATLTADKSSSTAYLQLNNLTSENSAVYFCASGYEDAMDYWGQGTSVTVSSGGGGSGGGGSGGGGSDIKMTQSPSSMYASLGERVIINCKASQDINSYLSWFQQKPGKSPKTLIYRANRLVDGVPSRFSGSGSGQDYSLTISSLEYEDMGIYYCLQYDEFPLTFGAGTKLELKRGLAVSTISSFFPPGYQIYIWAPLAGTCGVLLLSLVITLYCKRGRKKLLYIFKQPFMRPVQTTQEEDGCSCRFPEEEEGGCELRVKFSRSADAPAYQQGQNQLYNELNLGRREEYDVLDKRRGRDPEMGGKPRRKNPQEGLYNELQKDKMAEAYSEIGMKGERRRGKGHDGLYQGLSTATKDTYDALHMQALPPR

SEQ ID NO: 1459 - protein, 437 aa, Artificial Sequence
  source: /note="Description of Artificial Sequence: Synthetic Chimeric Antigen Receptor sequence"
QVQLQQSGPELVRPGTFVKISCKASGYTFTNYDINWVNQRPGQGLEWIGWIYPGDGSTKYNEKFKAKATLTADKSSSTAYLQLNNLTSENSAVYFCASGYEDAMDYWGQGTSVTVSSGGGGSGGGGSGGGGSDIKMTQSPSSMYASLGERVIINCKASQDINSYLSWFQQKPGKSPKTLIYRANRLVDGVPSRFSGSGSGQDYSLTISSLEYEDMGIYYCLQYDEFPLTFGAGTKLELKRGLAVSTISSFFPPGYQIISFFLALTSTALLFLLFFLTLRFSVVKRGRKKLLYIFKQPFMRPVQTTQEEDGCSCRFPEEEEGGCELRVKFSRSADAPAYQQGQNQLYNELNLGRREEYDVLDKRRGRDPEMGGKPRRKNPQEGLYNELQKDKMAEAYSEIGMKGERRRGKGHDGLYQGLSTATKDTYDALHMQALPPR

SEQ ID NO: 1460 - protein, 439 aa, Artificial Sequence
  source: /note="Description of Artificial Sequence: Synthetic Chimeric Antigen Receptor sequence"
EVQLQQSGPELVKPGASVKISCKASGYTFTDYNMHWVKQSHGKSLEWIGYIYPYNGGTGYNQKFKSKATLTVDNSSSTAYMDVRSLTSEDSAVYYCARGRPAMDYWGQGTSVTVSSGGGGSGGGGSGGGGSDIVLTQSPASLAVSLGQRATISCRASESVDNYGISFMNWFQQKPGQPPKLLIYAASNQGSGVPARFSGSGSGTDFSLNIHPMEEDDTAMYFCQQSKEVPWTFGGGTKLEIKGLAVSTISSFFPPGYQIISFFLALTSTALLFLLFFLTLRFSVVKRGRKKLLYIFKQPFMRPVQTTQEEDGCSCRFPEEEEGGCELRVKFSRSADAPAYQQGQNQLYNELNLGRREEYDVLDKRRGRDPEMGGKPRRKNPQEGLYNELQKDKMAEAYSEIGMKGERRRGKGHDGLYQGLSTATKDTYDALHMQALPPR

SEQ ID NO: 1461 - protein, 440 aa, Artificial Sequence
  source: /note="Description of Artificial Sequence: Synthetic Chimeric Antigen Receptor sequence"
QVQLQQPGAEVVKPGASVKMSCKASGYTFTSYYIHWIKQTPGQGLEWVGVIYPGNDDISYNQKFKGKATLTADKSSTTAYMQLSSLTSEDSAVYYCAREVRLRYFDVWGAGTTVTVSSGGGGSGGGGSGGGGSNIMLTQSPSSLAVSAGEKVTMSCKSSQSVFFSSSQKNYLAWYQQIPGQSPKLLIYWASTRESGVPDRFTGSGSGTDFTLTISSVQSEDLAIYYCHQYLSSRTFGGGTKLEIKRGLAVSTISSFFPPGYQIYIWAPLAGTCGVLLLSLVITLYCKRGRKKLLYIFKQPFMRPVQTTQEEDGCSCRFPEEEEGGCELRVKFSRSADAPAYQQGQNQLYNELNLGRREEYDVLDKRRGRDPEMGGKPRRKNPQEGLYNELQKDKMAEAYSEIGMKGERRRGKGHDGLYQGLSTATKDTYDALHMQALPPR

SEQ ID NO: 1462 - protein, 443 aa, Artificial Sequence
  source: /note="Description of Artificial Sequence: Synthetic Chimeric Antigen Receptor sequence"
QVQLQQPGAEVVKPGASVKMSCKASGYTFTSYYIHWIKQTPGQGLEWVGVIYPGNDDISYNQKFKGKATLTADKSSTTAYMQLSSLTSEDSAVYYCAREVRLRYFDVWGAGTTVTVSSGGGGSGGGGSGGGGSNIMLTQSPSSLAVSAGEKVTMSCKSSQSVFFSSSQKNYLAWYQQIPGQSPKLLIYWASTRESGVPDRFTGSGSGTDFTLTISSVQSEDLAIYYCHQYLSSRTFGGGTKLEIKRGLAVSTISSFFPPGYQIISFFLALTSTALLFLLFFLTLRFSVVKRGRKKLLYIFKQPFMRPVQTTQEEDGCSCRFPEEEEGGCELRVKFSRSADAPAYQQGQNQLYNELNLGRREEYDVLDKRRGRDPEMGGKPRRKNPQEGLYNELQKDKMAEAYSEIGMKGERRRGKGHDGLYQGLSTATKDTYDALHMQALPPR

SEQ ID NO: 1463 - protein, 444 aa, Artificial Sequence
  source: /note="Description of Artificial Sequence: Synthetic Chimeric Antigen Receptor sequence"
EVKLQESGPELVKPGASVKMSCKASGYKFTDYVVHWLKQKPGQGLEWIGYINPYNDGTKYNEKFKGKATLTSDKSSSTAYMEVSSLTSEDSAVYYCARDYRYEVYGMDYWGQGTSVTVSSGGGGSGGGGSGGGGSDIVLTQSPTIMSASPGERVTMTCTASSSVNYIHWYQQKSGDSPLRWIFDTSKVASGVPARFSGSGSGTSYSLTISTMEAEDAATYYCQQWRSYPLTFGDGTRLELKRADAAPTVSGLAVSTISSFFPPGYQIYIWAPLAGTCGVLLLSLVITLYCKRGRKKLLYIFKQPFMRPVQTTQEEDGCSCRFPEEEEGGCELRVKFSRSADAPAYQQGQNQLYNELNLGRREEYDVLDKRRGRDPEMGGKPRRKNPQEGLYNELQKDKMAEAYSEIGMKGERRRGKGHDGLYQGLSTATKDTYDALHMQALPPR

SEQ ID NO: 1464 - protein, 447 aa, Artificial Sequence
  source: /note="Description of Artificial Sequence: Synthetic Chimeric Antigen Receptor sequence"
EVKLQESGPELVKPGASVKMSCKASGYKFTDYVVHWLKQKPGQGLEWIGYINPYNDGTKYNEKFKGKATLTSDKSSSTAYMEVSSLTSEDSAVYYCARDYRYEVYGMDYWGQGTSVTVSSGGGGSGGGGSGGGGSDIVLTQSPTIMSASPGERVTMTCTASSSVNYIHWYQQKSGDSPLRWIFDTSKVASGVPARFSGSGSGTSYSLTISTMEAEDAATYYCQQWRSYPLTFGDGTRLELKRADAAPTVSGLAVSTISSFFPPGYQIISFFLALTSTALLFLLFFLTLRFSVVKRGRKKLLYIFKQPFMRPVQTTQEEDGCSCRFPEEEEGGCELRVKFSRSADAPAYQQGQNQLYNELNLGRREEYDVLDKRRGRDPEMGGKPRRKNPQEGLYNELQKDKMAEAYSEIGMKGERRRGKGHDGLYQGLSTATKDTYDALHMQALPPR

SEQ ID NO: 1465 - protein, 463 aa, Artificial Sequence
  source: /note="Description of Artificial Sequence: Synthetic Chimeric Antigen Receptor sequence"
QVQLQQSGPELVRPGTFVKISCKASGYTFTNYDINWVNQRPGQGLEWIGWIYPGDGSTKYNEKFKAKATLTADKSSSTAYLQLNNLTSENSAVYFCASGYEDAMDYWGQGTSVTVSSGGGGSGGGGSGGGGSDIKMTQSPSSMYASLGERVIINCKASQDINSYLSWFQQKPGKSPKTLIYRANRLVDGVPSRFSGSGSGQDYSLTISSLEYEDMGIYYCLQYDEFPLTFGAGTKLELKRTTTPAPRPPTPAPTIASQPLSLRPEACRPAAGGAVHTRGLDFACDIYIWAPLAGTCGVLLLSLVITLYCKRGRKKLLYIFKQPFMRPVQTTQEEDGCSCRFPEEEEGGCELRVKFSRSADAPAYQQGQNQLYNELNLGRREEYDVLDKRRGRDPEMGGKPRRKNPQEGLYNELQKDKMAEAYSEIGMKGERRRGKGHDGLYQGLSTATKDTYDALHMQALPPR

SEQ ID NO: 1466 - protein, 465 aa, Artificial Sequence
  source: /note="Description of Artificial Sequence: Synthetic Chimeric Antigen Receptor sequence"
EVQLQQSGPELVKPGASVKISCKASGYTFTDYNMHWVKQSHGKSLEWIGYIYPYNGGTGYNQKFKSKATLTVDNSSSTAYMDVRSLTSEDSAVYYCARGRPAMDYWGQGTSVTVSSGGGGSGGGGSGGGGSDIVLTQSPASLAVSLGQRATISCRASESVDNYGISFMNWFQQKPGQPPKLLIYAASNQGSGVPARFSGSGSGTDFSLNIHPMEEDDTAMYFCQQSKEVPWTFGGGTKLEIKTTTPAPRPPTPAPTIASQPLSLRPEACRPAAGGAVHTRGLDFACDIYIWAPLAGTCGVLLLSLVITLYCKRGRKKLLYIFKQPFMRPVQTTQEEDGCSCRFPEEEEGGCELRVKFSRSADAPAYQQGQNQLYNELNLGRREEYDVLDKRRGRDPEMGGKPRRKNPQEGLYNELQKDKMAEAYSEIGMKGERRRGKGHDGLYQGLSTATKDTYDALHMQALPPR

SEQ ID NO: 1467 - protein, 466 aa, Artificial Sequence
  source: /note="Description of Artificial Sequence: Synthetic Chimeric Antigen Receptor sequence"
QVQLQQSGPELVRPGTFVKISCKASGYTFTNYDINWVNQRPGQGLEWIGWIYPGDGSTKYNEKFKAKATLTADKSSSTAYLQLNNLTSENSAVYFCASGYEDAMDYWGQGTSVTVSSGGGGSGGGGSGGGGSDIKMTQSPSSMYASLGERVIINCKASQDINSYLSWFQQKPGKSPKTLIYRANRLVDGVPSRFSGSGSGQDYSLTISSLEYEDMGIYYCLQYDEFPLTFGAGTKLELKRTTTPAPRPPTPAPTIASQPLSLRPEACRPAAGGAVHTRGLDFACDIISFFLALTSTALLFLLFFLTLRFSVVKRGRKKLLYIFKQPFMRPVQTTQEEDGCSCRFPEEEEGGCELRVKFSRSADAPAYQQGQNQLYNELNLGRREEYDVLDKRRGRDPEMGGKPRRKNPQEGLYNELQKDKMAEAYSEIGMKGERRRGKGHDGLYQGLSTATKDTYDALHMQALPPR

SEQ ID NO: 1468 - protein, 468 aa, Artificial Sequence
  source: /note="Description of Artificial Sequence: Synthetic Chimeric Antigen Receptor sequence"
EVQLQQSGPELVKPGASVKISCKASGYTFTDYNMHWVKQSHGKSLEWIGYIYPYNGGTGYNQKFKSKATLTVDNSSSTAYMDVRSLTSEDSAVYYCARGRPAMDYWGQGTSVTVSSGGGGSGGGGSGGGGSDIVLTQSPASLAVSLGQRATISCRASESVDNYGISFMNWFQQKPGQPPKLLIYAASNQGSGVPARFSGSGSGTDFSLNIHPMEEDDTAMYFCQQSKEVPWTFGGGTKLEIKTTTPAPRPPTPAPTIASQPLSLRPEACRPAAGGAVHTRGLDFACDIISFFLALTSTALLFLLFFLTLRFSVVKRGRKKLLYIFKQPFMRPVQTTQEEDGCSCRFPEEEEGGCELRVKFSRSADAPAYQQGQNQLYNELNLGRREEYDVLDKRRGRDPEMGGKPRRKNPQEGLYNELQKDKMAEAYSEIGMKGERRRGKGHDGLYQGLSTATKDTYDALHMQALPPR

SEQ ID NO: 1469 - protein, 469 aa, Artificial Sequence
  source: /note="Description of Artificial Sequence: Synthetic Chimeric Antigen Receptor sequence"
QVQLQQPGAEVVKPGASVKMSCKASGYTFTSYYIHWIKQTPGQGLEWVGVIYPGNDDISYNQKFKGKATLTADKSSTTAYMQLSSLTSEDSAVYYCAREVRLRYFDVWGAGTTVTVSSGGGGSGGGGSGGGGSNIMLTQSPSSLAVSAGEKVTMSCKSSQSVFFSSSQKNYLAWYQQIPGQSPKLLIYWASTRESGVPDRFTGSGSGTDFTLTISSVQSEDLAIYYCHQYLSSRTFGGGTKLEIKRTTTPAPRPPTPAPTIASQPLSLRPEACRPAAGGAVHTRGLDFACDIYIWAPLAGTCGVLLLSLVITLYCKRGRKKLLYIFKQPFMRPVQTTQEEDGCSCRFPEEEEGGCELRVKFSRSADAPAYQQGQNQLYNELNLGRREEYDVLDKRRGRDPEMGGKPRRKNPQEGLYNELQKDKMAEAYSEIGMKGERRRGKGHDGLYQGLSTATKDTYDALHMQALPPR

SEQ ID NO: 1470 - protein, 472 aa, Artificial Sequence
  source: /note="Description of Artificial Sequence: Synthetic Chimeric Antigen Receptor sequence"
QVQLQQPGAEVVKPGASVKMSCKASGYTFTSYYIHWIKQTPGQGLEWVGVIYPGNDDISYNQKFKGKATLTADKSSTTAYMQLSSLTSEDSAVYYCAREVRLRYFDVWGAGTTVTVSSGGGGSGGGGSGGGGSNIMLTQSPSSLAVSAGEKVTMSCKSSQSVFFSSSQKNYLAWYQQIPGQSPKLLIYWASTRESGVPDRFTGSGSGTDFTLTISSVQSEDLAIYYCHQYLSSRTFGGGTKLEIKRTTTPAPRPPTPAPTIASQPLSLRPEACRPAAGGAVHTRGLDFACDIISFFLALTSTALLFLLFFLTLRFSVVKRGRKKLLYIFKQPFMRPVQTTQEEDGCSCRFPEEEEGGCELRVKFSRSADAPAYQQGQNQLYNELNLGRREEYDVLDKRRGRDPEMGGKPRRKNPQEGLYNELQKDKMAEAYSEIGMKGERRRGKGHDGLYQGLSTATKDTYDALHMQALPPR

SEQ ID NO: 1471 - protein, 473 aa, Artificial Sequence
  source: /note="Description of Artificial Sequence: Synthetic Chimeric Antigen Receptor sequence"
EVKLQESGPELVKPGASVKMSCKASGYKFTDYVVHWLKQKPGQGLEWIGYINPYNDGTKYNEKFKGKATLTSDKSSSTAYMEVSSLTSEDSAVYYCARDYRYEVYGMDYWGQGTSVTVSSGGGGSGGGGSGGGGSDIVLTQSPTIMSASPGERVTMTCTASSSVNYIHWYQQKSGDSPLRWIFDTSKVASGVPARFSGSGSGTSYSLTISTMEAEDAATYYCQQWRSYPLTFGDGTRLELKRADAAPTVSTTTPAPRPPTPAPTIASQPLSLRPEACRPAAGGAVHTRGLDFACDIYIWAPLAGTCGVLLLSLVITLYCKRGRKKLLYIFKQPFMRPVQTTQEEDGCSCRFPEEEEGGCELRVKFSRSADAPAYQQGQNQLYNELNLGRREEYDVLDKRRGRDPEMGGKPRRKNPQEGLYNELQKDKMAEAYSEIGMKGERRRGKGHDGLYQGLSTATKDTYDALHMQALPPR

SEQ ID NO: 1472 - protein, 476 aa, Artificial Sequence
  source: /note="Description of Artificial Sequence: Synthetic Chimeric Antigen Receptor sequence"
EVKLQESGPELVKPGASVKMSCKASGYKFTDYVVHWLKQKPGQGLEWIGYINPYNDGTKYNEKFKGKATLTSDKSSSTAYMEVSSLTSEDSAVYYCARDYRYEVYGMDYWGQGTSVTVSSGGGGSGGGGSGGGGSDIVLTQSPTIMSASPGERVTMTCTASSSVNYIHWYQQKSGDSPLRWIFDTSKVASGVPARFSGSGSGTSYSLTISTMEAEDAATYYCQQWRSYPLTFGDGTRLELKRADAAPTVSTTTPAPRPPTPAPTIASQPLSLRPEACRPAAGGAVHTRGLDFACDIISFFLALTSTALLFLLFFLTLRFSVVKRGRKKLLYIFKQPFMRPVQTTQEEDGCSCRFPEEEEGGCELRVKFSRSADAPAYQQGQNQLYNELNLGRREEYDVLDKRRGRDPEMGGKPRRKNPQEGLYNELQKDKMAEAYSEIGMKGERRRGKGHDGLYQGLSTATKDTYDALHMQALPPR

SEQ ID NO: 1473 - protein, 649 aa, Artificial Sequence
  source: /note="Description of Artificial Sequence: Synthetic Chimeric Antigen Receptor sequence"
QVQLQQSGPELVRPGTFVKISCKASGYTFTNYDINWVNQRPGQGLEWIGWIYPGDGSTKYNEKFKAKATLTADKSSSTAYLQLNNLTSENSAVYFCASGYEDAMDYWGQGTSVTVSSGGGGSGGGGSGGGGSDIKMTQSPSSMYASLGERVIINCKASQDINSYLSWFQQKPGKSPKTLIYRANRLVDGVPSRFSGSGSGQDYSLTISSLEYEDMGIYYCLQYDEFPLTFGAGTKLELKREPKSPDKTHTCPPCPAPPVAGPSVFLFPPKPKDTLMIARTPEVTCVVVDVSHEDPEVKFNWYVDGVEVHNAKTKPREEQYNSTYRVVSVLTVLHQDWLNGKEYKCKVSNKALPAPIEKTISKAKGQPREPQVYTLPPSRDELTKNQVSLTCLVKGFYPSDIAVEWESNGQPENNYKTTPPVLDSDGSFFLYSKLTVDKSRWQQGNVFSCSVMHEALHNHYTQKSLSLSPGKIYIWAPLAGTCGVLLLSLVITLYCKRGRKKLLYIFKQPFMRPVQTTQEEDGCSCRFPEEEEGGCELRVKFSRSADAPAYQQGQNQLYNELNLGRREEYDVLDKRRGRDPEMGGKPRRKNPQEGLYNELQKDKMAEAYSEIGMKGERRRGKGHDGLYQGLSTATKDTYDALHMQALPPR

SEQ ID NO: 1474 - protein, 651 aa, Artificial Sequence
  source: /note="Description of Artificial Sequence: Synthetic Chimeric Antigen Receptor sequence"
EVQLQQSGPELVKPGASVKISCKASGYTFTDYNMHWVKQSHGKSLEWIGYIYPYNGGTGYNQKFKSKATLTVDNSSSTAYMDVRSLTSEDSAVYYCARGRPAMDYWGQGTSVTVSSGGGGSGGGGSGGGGSDIVLTQSPASLAVSLGQRATISCRASESVDNYGISFMNWFQQKPGQPPKLLIYAASNQGSGVPARFSGSGSGTDFSLNIHPMEEDDTAMYFCQQSKEVPWTFGGGTKLEIKEPKSPDKTHTCPPCPAPPVAGPSVFLFPPKPKDTLMIARTPEVTCVVVDVSHEDPEVKFNWYVDGVEVHNAKTKPREEQYNSTYRVVSVLTVLHQDWLNGKEYKCKVSNKALPAPIEKTISKAKGQPREPQVYTLPPSRDELTKNQVSLTCLVKGFYPSDIAVEWESNGQPENNYKTTPPVLDSDGSFFLYSKLTVDKSRWQQGNVFSCSVMHEALHNHYTQKSLSLSPGKIYIWAPLAGTCGVLLLSLVITLYCKRGRKKLLYIFKQPFMRPVQTTQEEDGCSCRFPEEEEGGCELRVKFSRSADAPAYQQGQNQLYNELNLGRREEYDVLDKRRGRDPEMGGKPRRKNPQEGLYNELQKDKMAEAYSEIGMKGERRRGKGHDGLYQGLSTATKDTYDALHMQALPPR

SEQ ID NO: 1475 - protein, 654 aa, Artificial Sequence
  source: /note="Description of Artificial Sequence: Synthetic Chimeric Antigen Receptor sequence"
EVQLQQSGPELVKPGASVKISCKASGYTFTDYNMHWVKQSHGKSLEWIGYIYPYNGGTGYNQKFKSKATLTVDNSSSTAYMDVRSLTSEDSAVYYCARGRPAMDYWGQGTSVTVSSGGGGSGGGGSGGGGSDIVLTQSPASLAVSLGQRATISCRASESVDNYGISFMNWFQQKPGQPPKLLIYAASNQGSGVPARFSGSGSGTDFSLNIHPMEEDDTAMYFCQQSKEVPWTFGGGTKLEIKEPKSPDKTHTCPPCPAPPVAGPSVFLFPPKPKDTLMIARTPEVTCVVVDVSHEDPEVKFNWYVDGVEVHNAKTKPREEQYNSTYRVVSVLTVLHQDWLNGKEYKCKVSNKALPAPIEKTISKAKGQPREPQVYTLPPSRDELTKNQVSLTCLVKGFYPSDIAVEWESNGQPENNYKTTPPVLDSDGSFFLYSKLTVDKSRWQQGNVFSCSVMHEALHNHYTQKSLSLSPGKIISFFLALTSTALLFLLFFLTLRFSVVKRGRKKLLYIFKQPFMRPVQTTQEEDGCSCRFPEEEEGGCELRVKFSRSADAPAYQQGQNQLYNELNLGRREEYDVLDKRRGRDPEMGGKPRRKNPQEGLYNELQKDKMAEAYSEIGMKGERRRGKGHDGLYQGLSTATKDTYDALHMQALPPR

SEQ ID NO: 1476 - protein, 655 aa, Artificial Sequence
  source: /note="Description of Artificial Sequence: Synthetic Chimeric Antigen Receptor sequence"
QVQLQQPGAEVVKPGASVKMSCKASGYTFTSYYIHWIKQTPGQGLEWVGVIYPGNDDISYNQKFKGKATLTADKSSTTAYMQLSSLTSEDSAVYYCAREVRLRYFDVWGAGTTVTVSSGGGGSGGGGSGGGGSNIMLTQSPSSLAVSAGEKVTMSCKSSQSVFFSSSQKNYLAWYQQIPGQSPKLLIYWASTRESGVPDRFTGSGSGTDFTLTISSVQSEDLAIYYCHQYLSSRTFGGGTKLEIKREPKSPDKTHTCPPCPAPPVAGPSVFLFPPKPKDTLMIARTPEVTCVVVDVSHEDPEVKFNWYVDGVEVHNAKTKPREEQYNSTYRVVSVLTVLHQDWLNGKEYKCKVSNKALPAPIEKTISKAKGQPREPQVYTLPPSRDELTKNQVSLTCLVKGFYPSDIAVEWESNGQPENNYKTTPPVLDSDGSFFLYSKLTVDKSRWQQGNVFSCSVMHEALHNHYTQKSLSLSPGKIYIWAPLAGTCGVLLLSLVITLYCKRGRKKLLYIFKQPFMRPVQTTQEEDGCSCRFPEEEEGGCELRVKFSRSADAPAYQQGQNQLYNELNLGRREEYDVLDKRRGRDPEMGGKPRRKNPQEGLYNELQKDKMAEAYSEIGMKGERRRGKGHDGLYQGLSTATKDTYDALHMQALPPR

SEQ ID NO: 1477 - protein, 658 aa, Artificial Sequence
  source: /note="Description of Artificial Sequence: Synthetic Chimeric Antigen Receptor sequence"
QVQLQQPGAEVVKPGASVKMSCKASGYTFTSYYIHWIKQTPGQGLEWVGVIYPGNDDISYNQKFKGKATLTADKSSTTAYMQLSSLTSEDSAVYYCAREVRLRYFDVWGAGTTVTVSSGGGGSGGGGSGGGGSNIMLTQSPSSLAVSAGEKVTMSCKSSQSVFFSSSQKNYLAWYQQIPGQSPKLLIYWASTRESGVPDRFTGSGSGTDFTLTISSVQSEDLAIYYCHQYLSSRTFGGGTKLEIKREPKSPDKTHTCPPCPAPPVAGPSVFLFPPKPKDTLMIARTPEVTCVVVDVSHEDPEVKFNWYVDGVEVHNAKTKPREEQYNSTYRVVSVLTVLHQDWLNGKEYKCKVSNKALPAPIEKTISKAKGQPREPQVYTLPPSRDELTKNQVSLTCLVKGFYPSDIAVEWESNGQPENNYKTTPPVLDSDGSFFLYSKLTVDKSRWQQGNVFSCSVMHEALHNHYTQKSLSLSPGKIISFFLALTSTALLFLLFFLTLRFSVVKRGRKKLLYIFKQPFMRPVQTTQEEDGCSCRFPEEEEGGCELRVKFSRSADAPAYQQGQNQLYNELNLGRREEYDVLDKRRGRDPEMGGKPRRKNPQEGLYNELQKDKMAEAYSEIGMKGERRRGKGHDGLYQGLSTATKDTYDALHMQALPPR

SEQ ID NO: 1478 - protein, 659 aa, Artificial Sequence
  source: /note="Description of Artificial Sequence: Synthetic Chimeric Antigen Receptor sequence"
EVKLQESGPELVKPGASVKMSCKASGYKFTDYVVHWLKQKPGQGLEWIGYINPYNDGTKYNEKFKGKATLTSDKSSSTAYMEVSSLTSEDSAVYYCARDYRYEVYGMDYWGQGTSVTVSSGGGGSGGGGSGGGGSDIVLTQSPTIMSASPGERVTMTCTASSSVNYIHWYQQKSGDSPLRWIFDTSKVASGVPARFSGSGSGTSYSLTISTMEAEDAATYYCQQWRSYPLTFGDGTRLELKRADAAPTVSEPKSPDKTHTCPPCPAPPVAGPSVFLFPPKPKDTLMIARTPEVTCVVVDVSHEDPEVKFNWYVDGVEVHNAKTKPREEQYNSTYRVVSVLTVLHQDWLNGKEYKCKVSNKALPAPIEKTISKAKGQPREPQVYTLPPSRDELTKNQVSLTCLVKGFYPSDIAVEWESNGQPENNYKTTPPVLDSDGSFFLYSKLTVDKSRWQQGNVFSCSVMHEALHNHYTQKSLSLSPGKIYIWAPLAGTCGVLLLSLVITLYCKRGRKKLLYIFKQPFMRPVQTTQEEDGCSCRFPEEEEGGCELRVKFSRSADAPAYQQGQNQLYNELNLGRREEYDVLDKRRGRDPEMGGKPRRKNPQEGLYNELQKDKMAEAYSEIGMKGERRRGKGHDGLYQGLSTATKDTYDALHMQALPPR

SEQ ID NO: 1479 - protein, 662 aa, Artificial Sequence
  source: /note="Description of Artificial Sequence: Synthetic Chimeric Antigen Receptor sequence"
EVKLQESGPELVKPGASVKMSCKASGYKFTDYVVHWLKQKPGQGLEWIGYINPYNDGTKYNEKFKGKATLTSDKSSSTAYMEVSSLTSEDSAVYYCARDYRYEVYGMDYWGQGTSVTVSSGGGGSGGGGSGGGGSDIVLTQSPTIMSASPGERVTMTCTASSSVNYIHWYQQKSGDSPLRWIFDTSKVASGVPARFSGSGSGTSYSLTISTMEAEDAATYYCQQWRSYPLTFGDGTRLELKRADAAPTVSEPKSPDKTHTCPPCPAPPVAGPSVFLFPPKPKDTLMIARTPEVTCVVVDVSHEDPEVKFNWYVDGVEVHNAKTKPREEQYNSTYRVVSVLTVLHQDWLNGKEYKCKVSNKALPAPIEKTISKAKGQPREPQVYTLPPSRDELTKNQVSLTCLVKGFYPSDIAVEWESNGQPENNYKTTPPVLDSDGSFFLYSKLTVDKSRWQQGNVFSCSVMHEALHNHYTQKSLSLSPGKIISFFLALTSTALLFLLFFLTLRFSVVKRGRKKLLYIFKQPFMRPVQTTQEEDGCSCRFPEEEEGGCELRVKFSRSADAPAYQQGQNQLYNELNLGRREEYDVLDKRRGRDPEMGGKPRRKNPQEGLYNELQKDKMAEAYSEIGMKGERRRGKGHDGLYQGLSTATKDTYDALHMQALPPR

SEQ ID NO: 1480 - protein, 378 aa, Artificial Sequence
  source: /note="Description of Artificial Sequence: Synthetic Chimeric Antigen Receptor sequence"
MVLLWLTLLLIALPCLLQTKEDPNPPITNLRMKAKAQQLTWDLNRNVTDIECVKDADYSMPAVNNSYCQFGAISLCEVTNYTVRVANPPFSTWILFPENSGKPWAGAENLTCWIHDVDFLSCSWAVGPGAPADVQYDLYLNVANRRQQYECLHYKTDAQGTRIGCRFDDISRLSSGSQSSHILVRGRSAAFGIPCTDKFVVFSQIEILTPPNMTAKCNKTHSFMHWKMRSHFNRKFRYELQIQKRMQPVITEQVRDRTSFQLLNPGTYTVQIRARERVYEFLSAWSTPQRFECDQEEGANTRAWRTSLLIALGTLLALVCVFVICRRYLVMQRLFPRIPHMKDPIGDSFQNDKLVVWEAGKAGLEECLVTEVQVVQKT

SEQ ID NO: 1481 - protein, 383 aa, Artificial Sequence
  source: /note="Description of Artificial Sequence: Synthetic Chimeric Antigen Receptor sequence"
MALPVTALLLPLALLLHAARPGSGSGAQAAQVQLVQSGAEVKKPGASVKVSCKASGYSFPDYYINWVRQAPGQGLEWMGWIYFASGNSEYNQKFTGRVTMTRDTSSSTAYMELSSLRSEDTAVYFCASLYDYDWYFDVWGQGTMVTVSSGGGGSGGGGSGGGGSDIVMTQTPLSLSVTPGEPASISCKSSQSLVHSNGNTYLHWYLQKPGQSPQLLIYKVSNRFSGVPDRFSGSGSGADFTLKISRVEAEDVGVYYCAETSHVPWTFGQGTKLEIKRSDPASGAGSGSGSAVKEGPPSEHSGISRNAIIFLVLGILVFLILLGIGIYFYWSKCSREVLWHCHLCPSSTEHASASANGHVSYSAVSRENSSSQDPQTEGTRSHG

SEQ ID NO: 1482 - protein, 391 aa, Artificial Sequence
  source: /note="Description of Artificial Sequence: Synthetic Chimeric Antigen Receptor sequence"
MALPVTALLLPLALLLHAARPGSGSGAQAAQVQLVQSGAEVKKPGASVKVSCKASGYSFPDYYINWVRQAPGQGLEWMGWIYFASGNSEYNQKFTGRVTMTRDTSSSTAYMELSSLRSEDTAVYFCASLYDYDWYFDVWGQGTMVTVSSGGGGSGGGGSGGGGSDIVMTQTPLSLSVTPGEPASISCKSSQSLVHSNGNTYLHWYLQKPGQSPQLLIYKVSNRFSGVPDRFSGSGSGADFTLKISRVEAEDVGVYYCAETSHVPWTFGQGTKLEIKRSDPASGAGSGSGSAVQAPSSSPMGIIVAVVTGIAVAAIVAAVVALIYCRKKRISALPGYPECREMGETLPEKPANPTNPDEADKVGAENTITYSLLMHPDALEEPDDQNRISHG

SEQ ID NO: 1483 - protein, 409 aa, Artificial Sequence
  source: /note="Description of Artificial Sequence: Synthetic Chimeric Antigen Receptor sequence"
MALPVTALLLPLALLLHAARPGSGSGAQAAQVQLVQSGAEVKKPGASVKVSCKASGYSFPDYYINWVRQAPGQGLEWMGWIYFASGNSEYNQKFTGRVTMTRDTSSSTAYMELSSLRSEDTAVYFCASLYDYDWYFDVWGQGTMVTVSSGGGGSGGGGSGGGGSDIVMTQTPLSLSVTPGEPASISCKSSQSLVHSNGNTYLHWYLQKPGQSPQLLIYKVSNRFSGVPDRFSGSGSGADFTLKISRVEAEDVGVYYCAETSHVPWTFGQGTKLEIKRSDPASGAGSGSGSASFRALPHAWSDPSDPLPVSVTGNSRYLHALIGTSVVIIPFAILLFFLLHRWCANKKNAVVMDQEPAGNRTVNREDSDEQDPQEVTYAQLNHCVFTQRKITRPSQRPKTPPTDTSVSHG

SEQ ID NO: 1484 - protein, 414 aa, Artificial Sequence
  source: /note="Description of Artificial Sequence: Synthetic Chimeric Antigen Receptor sequence"
MALPVTALLLPLALLLHAARPGSGSGAQAAQVQLVQSGAEVKKPGASVKVSCKASGYSFPDYYINWVRQAPGQGLEWMGWIYFASGNSEYNQKFTGRVTMTRDTSSSTAYMELSSLRSEDTAVYFCASLYDYDWYFDVWGQGTMVTVSSGGGGSGGGGSGGGGSDIVMTQTPLSLSVTPGEPASISCKSSQSLVHSNGNTYLHWYLQKPGQSPQLLIYKVSNRFSGVPDRFSGSGSGADFTLKISRVEAEDVGVYYCAETSHVPWTFGQGTKLEIKRSDPASGAGSGSGSALFVHWKPEGRAGGVLGAVWGASITTLVFLCVCFIFRVKTRRKKAAQPVQNTDDVNPVMVSGSRGHQHQFQTGIVSDHPAEAGPISEDEQELHYAVLHFHKVQPQEPKVTDTEYSEIKIHKSHG

SEQ ID NO: 1485 - protein, 415 aa, Artificial Sequence
  source: /note="Description of Artificial Sequence: Synthetic Chimeric Antigen Receptor sequence"
MALPVTALLLPLALLLHAARPGSGSGAQAAQVQLVQSGAEVKKPGASVKVSCKASGYSFPDYYINWVRQAPGQGLEWMGWIYFASGNSEYNQKFTGRVTMTRDTSSSTAYMELSSLRSEDTAVYFCASLYDYDWYFDVWGQGTMVTVSSGGGGSGGGGSGGGGSDIVMTQTPLSLSVTPGEPASISCKSSQSLVHSNGNTYLHWYLQKPGQSPQLLIYKVSNRFSGVPDRFSGSGSGADFTLKISRVEAEDVGVYYCAETSHVPWTFGQGTKLEIKRSDPASGAGSGSGSAGPDGYRRDLMTAGVLWGLFGVLGFTGVALLLYALFHKISGESSATNEPRGASRPNPQEFTYSSPTPDMEELQPVYVNVGSVDVDVVYSQVWSMQQPESSANIRTLLENKDSQVIYSSVKKSSHG

SEQ ID NO: 1486 - protein, 417 aa, Artificial Sequence
  source: /note="Description of Artificial Sequence: Synthetic Chimeric Antigen Receptor sequence"
MALPVTALLLPLALLLHAARPGSGSGAQAAQVQLVQSGAEVKKPGASVKVSCKASGYSFPDYYINWVRQAPGQGLEWMGWIYFASGNSEYNQKFTGRVTMTRDTSSSTAYMELSSLRSEDTAVYFCASLYDYDWYFDVWGQGTMVTVSSGGGGSGGGGSGGGGSDIVMTQTPLSLSVTPGEPASISCKSSQSLVHSNGNTYLHWYLQKPGQSPQLLIYKVSNRFSGVPDRFSGSGSGADFTLKISRVEAEDVGVYYCAETSHVPWTFGQGTKLEIKRSDPASGAGSGSGSAPGHIRLYVVEKENLPVFPVWVVVGIVTAVVLGLTLLISMILAVLYRRKNSKRDYTGCSTSESLSPVKQAPRKSPSDTEGLVKSLPSGSHQGPVIYAQLDHSGGHHSDKINKSESVVYADIRKNSHG

SEQ ID NO: 1487 - protein, 421 aa, Artificial Sequence
  source: /note="Description of Artificial Sequence: Synthetic Chimeric Antigen Receptor sequence"
MALPVTALLLPLALLLHAARPGSGSGAQAAQVQLVQSGAEVKKPGASVKVSCKASGYSFPDYYINWVRQAPGQGLEWMGWIYFASGNSEYNQKFTGRVTMTRDTSSSTAYMELSSLRSEDTAVYFCASLYDYDWYFDVWGQGTMVTVSSGGGGSGGGGSGGGGSDIVMTQTPLSLSVTPGEPASISCKSSQSLVHSNGNTYLHWYLQKPGQSPQLLIYKVSNRFSGVPDRFSGSGSGADFTLKISRVEAEDVGVYYCAETSHVPWTFGQGTKLEIKRSDPASGAGSGSGSALQSKATSGVTQGVVGGAGATALVFLSFCVIFVVVRSCRKKSARPAAGVGDTGIEDANAVRGSASQGPLTEPWAEDSPPDQPPPASARSSVGEGELQYASLSFQMVKPWDSRGQEATDTEYSEIKIHRSHG

SEQ ID NO: 1488 - protein, 424 aa, Artificial Sequence
  source: /note="Description of Artificial Sequence: Synthetic Chimeric Antigen Receptor sequence"
MALPVTALLLPLALLLHAARPGSGSGAQAAQVQLVQSGAEVKKPGASVKVSCKASGYSFPDYYINWVRQAPGQGLEWMGWIYFASGNSEYNQKFTGRVTMTRDTSSSTAYMELSSLRSEDTAVYFCASLYDYDWYFDVWGQGTMVTVSSGGGGSGGGGSGGGGSDIVMTQTPLSLSVTPGEPASISCKSSQSLVHSNGNTYLHWYLQKPGQSPQLLIYKVSNRFSGVPDRFSGSGSGADFTLKISRVEAEDVGVYYCAETSHVPWTFGQGTKLEIKRSDPASGAGSGSGSAMPSTGGDSCPFCLKLLLPGLLLLLVVIILILAFWVLPKYKTRKAMRNNVPRDRGDTAMEVGIYANILEKQAKEESVPEVGSRPCVSTAQDEAKHSQELQYATPVFQEVAPREQEACDSYKSGYVYSELNFSHG

SEQ ID NO: 1489 - protein, 425 aa, Artificial Sequence
  source: /note="Description of Artificial Sequence: Synthetic Chimeric Antigen Receptor sequence"
MALPVTALLLPLALLLHAARPGSGSGAQAAQVQLVQSGAEVKKPGASVKVSCKASGYSFPDYYINWVRQAPGQGLEWMGWIYFASGNSEYNQKFTGRVTMTRDTSSSTAYMELSSLRSEDTAVYFCASLYDYDWYFDVWGQGTMVTVSSGGGGSGGGGSGGGGSDIVMTQTPLSLSVTPGEPASISCKSSQSLVHSNGNTYLHWYLQKPGQSPQLLIYKVSNRFSGVPDRFSGSGSGADFTLKISRVEAEDVGVYYCAETSHVPWTFGQGTKLEIKRSDPASGAGSGSGSALQQEYTGKMRPVSGVLLGAVGGAGATALVFLSFCVIFIVVRSCRKKSARPAADVGDIGMKDANTIRGSASQGNLTESWADDNPRHHGLAAHSSGEEREIQYAPLSFHKGEPQDLSGQEATNNEYSEIKIPKSHG

SEQ ID NO: 1490 - protein, 427 aa, Artificial Sequence
  source: /note="Description of Artificial Sequence: Synthetic Chimeric Antigen Receptor sequence"
MALPVTALLLPLALLLHAARPGSGSGAQAAQVQLVQSGAEVKKPGASVKVSCKASGYSFPDYYINWVRQAPGQGLEWMGWIYFASGNSEYNQKFTGRVTMTRDTSSSTAYMELSSLRSEDTAVYFCASLYDYDWYFDVWGQGTMVTVSSGGGGSGGGGSGGGGSDIVMTQTPLSLSVTPGEPASISCKSSQSLVHSNGNTYLHWYLQKPGQSPQLLIYKVSNRFSGVPDRFSGSGSGADFTLKISRVEAEDVGVYYCAETSHVPWTFGQGTKLEIKRSDPASGAGSGSGSALQNEYTGKMRPISGVTLGAFGGAGATALVFLYFCIIFVVVRSCRKKSARPAVGVGDTGMEDANAVRGSASQGPLIESPADDSPPHHAPPALATPSPEEGEIQYASLSFHKARPQYPQEQEAIGYEYSEINIPKSHG

SEQ ID NO: 1491 - protein, 430 aa, Artificial Sequence
  source: /note="Description of Artificial Sequence: Synthetic Chimeric Antigen Receptor sequence"
MALPVTALLLPLALLLHAARPGSGSGAQAAQVQLVQSGAEVKKPGASVKVSCKASGYSFPDYYINWVRQAPGQGLEWMGWIYFASGNSEYNQKFTGRVTMTRDTSSSTAYMELSSLRSEDTAVYFCASLYDYDWYFDVWGQGTMVTVSSGGGGSGGGGSGGGGSDIVMTQTPLSLSVTPGEPASISCKSSQSLVHSNGNTYLHWYLQKPGQSPQLLIYKVSNRFSGVPDRFSGSGSGADFTLKISRVEAEDVGVYYCAETSHVPWTFGQGTKLEIKRSDPASGAGSGSGSALNVTYVPQNPTTGIFPGDGSGKQETRAGVVHGAIGGAGVTALLALCLCLIFFIVKTHRRKAARTAVGRNDTHPTTGSASPKHQKKSKLHGPTETSSCSGAAPTVEMDEELHYASLNFHGMNPSKDTSTEYSEVRTQSHG

SEQ ID NO: 1492 - protein, 430 aa, Artificial Sequence
  source: /note="Description of Artificial Sequence: Synthetic Chimeric Antigen Receptor sequence"
MALPVTALLLPLALLLHAARPGSGSGAQAAQVQLVQSGAEVKKPGASVKVSCKASGYSFPDYYINWVRQAPGQGLEWMGWIYFASGNSEYNQKFTGRVTMTRDTSSSTAYMELSSLRSEDTAVYFCASLYDYDWYFDVWGQGTMVTVSSGGGGSGGGGSGGGGSDIVMTQTPLSLSVTPGEPASISCKSSQSLVHSNGNTYLHWYLQKPGQSPQLLIYKVSNRFSGVPDRFSGSGSGADFTLKISRVEAEDVGVYYCAETSHVPWTFGQGTKLEIKRSDPASGAGSGSGSAPYEWSNSSDPLLVSVTGNPSNSWPSPTEPSSETGNPRHLHVLIGTSVVIILFILLLFFLLHRWCCNKKNAVVMDQEPAGNRTVNREDSDEQDPQEVTYAQLNHCVFTQRKITRPSQRPKTPPTDIIVYTELPNAEPSHG

SEQ ID NO: 1493 - protein, 431 aa, Artificial Sequence
  source: /note="Description of Artificial Sequence: Synthetic Chimeric Antigen Receptor sequence"
MALPVTALLLPLALLLHAARPQVQLVQSGAEVKKPGASVKVSCKASGYSFPDYYINWVRQAPGQGLEWMGWIYFASGNSEYNQKFTGRVTMTRDTSSSTAYMELSSLRSEDTAVYFCASLYDYDWYFDVWGQGTMVTVSSGGGGSGGGGSGGGGSDIVMTQTPLSLSVTPGEPASISCKSSQSLVHSNGNTYLHWYLQKPGQSPQLLIYKVSNRFSGVPDRFSGSGSGADFTLKISRVEAEDVGVYYCAETSHVPWTFGQGTKLEIKYPLTFGAGTMLDLKRAAATERRAEVPTAHPSPSPRPAGQFQTLVVGVVGGLLGSLVLLVWVLAVICSRAARGTIGARRTGQPLKEDPSAVPVFSVDYGELDFQWREKTPEPPVPCVPEQTEYATIVFPSGMGTSSPARRGSADGPRSAQPLRPEDGHCSWPLSH

SEQ ID NO: 1494 - protein, 432 aa, Artificial Sequence
  source: /note="Description of Artificial Sequence: Synthetic Chimeric Antigen Receptor sequence"
MALPVTALLLPLALLLHAARPGSGSGAQAAQVQLVQSGAEVKKPGASVKVSCKASGYSFPDYYINWVRQAPGQGLEWMGWIYFASGNSEYNQKFTGRVTMTRDTSSSTAYMELSSLRSEDTAVYFCASLYDYDWYFDVWGQGTMVTVSSGGGGSGGGGSGGGGSDIVMTQTPLSLSVTPGEPASISCKSSQSLVHSNGNTYLHWYLQKPGQSPQLLIYKVSNRFSGVPDRFSGSGSGADFTLKISRVEAEDVGVYYCAETSHVPWTFGQGTKLEIKRSDPASGAGSGSGSALNFTVPTGARSNHLTSGVIEGLLSTLGPATVALLFCYGLKRKIGRRSARDPLRSLPSPLPQEFTYLNSPTPGQLQPIYENVNVVSGDEVYSLAYYNQPEQESVAAETLGTHMEDKVSLDIYSRLRKANITDVDYEDAMSHG

SEQ ID NO: 1495 - protein, 435 aa, Artificial Sequence
  source: /note="Description of Artificial Sequence: Synthetic Chimeric Antigen Receptor sequence"
MALPVTALLLPLALLLHAARPGSGSGAQAAQVQLVQSGAEVKKPGASVKVSCKASGYSFPDYYINWVRQAPGQGLEWMGWIYFASGNSEYNQKFTGRVTMTRDTSSSTAYMELSSLRSEDTAVYFCASLYDYDWYFDVWGQGTMVTVSSGGGGSGGGGSGGGGSDIVMTQTPLSLSVTPGEPASISCKSSQSLVHSNGNTYLHWYLQKPGQSPQLLIYKVSNRFSGVPDRFSGSGSGADFTLKISRVEAEDVGVYYCAETSHVPWTFGQGTKLEIKRSDPASGAGSGSGSAVTVRETPGNRDGLVAAGATGGLLSALLLAVALLFHCWRRRKSGVGFLGDETRLPPAPGPGESSHSICPAQVELQSLYVDVHPKKGDLVYSEIQTTQLGEEEEANTSRTLLEDKDVSVVYSEVKTQHPDNSAGKISSKDEESSHG

SEQ ID NO: 1496 - protein, 437 aa, Artificial Sequence
  source: /note="Description of Artificial Sequence: Synthetic Chimeric Antigen Receptor sequence"
MALPVTALLLPLALLLHAARPGSGSGAQAAQVQLVQSGAEVKKPGASVKVSCKASGYSFPDYYINWVRQAPGQGLEWMGWIYFASGNSEYNQKFTGRVTMTRDTSSSTAYMELSSLRSEDTAVYFCASLYDYDWYFDVWGQGTMVTVSSGGGGSGGGGSGGGGSDIVMTQTPLSLSVTPGEPASISCKSSQSLVHSNGNTYLHWYLQKPGQSPQLLIYKVSNRFSGVPDRFSGSGSGADFTLKISRVEAEDVGVYYCAETSHVPWTFGQGTKLEIKRSDPASGAGSGSGSALYITGLTANRSGPFATGVAGGLLSIAGLAAGALLLYCWLSRKAGRKPASDPARSPPDSDSQEPTYHNVPAWEELQPVYTNANPRGENVVYSEVRIIQEKKKHAVASDPRHLRNKGSPIIYSEVKVASTPVSGSLFLASSAPHRSHG

SEQ ID NO: 1497 - protein, 437 aa, Artificial Sequence
  source: /note="Description of Artificial Sequence: Synthetic Chimeric Antigen Receptor sequence"
MALPVTALLLPLALLLHAARPGSGSGAQAAQVQLVQSGAEVKKPGASVKVSCKASGYSFPDYYINWVRQAPGQGLEWMGWIYFASGNSEYNQKFTGRVTMTRDTSSSTAYMELSSLRSEDTAVYFCASLYDYDWYFDVWGQGTMVTVSSGGGGSGGGGSGGGGSDIVMTQTPLSLSVTPGEPASISCKSSQSLVHSNGNTYLHWYLQKPGQSPQLLIYKVSNRFSGVPDRFSGSGSGADFTLKISRVEAEDVGVYYCAETSHVPWTFGQGTKLEIKRSDPASGAGSGSGSAPYEWSKSSDPLLVSVTGNPSNSWPSPTEPSSKTGNPRHLHILIGTSVVIILFILLFFLLHRWCSNKKNAAVMDQESAGNRTANSEDSDEQDPQEVTYTQLNHCVFTQRKITRPSQRPKTPPTDIIVYTELPNAESRSKVVSCPSHG

SEQ ID NO: 1498 - protein, 437 aa, Artificial Sequence
  source: /note="Description of Artificial Sequence: Synthetic Chimeric Antigen Receptor sequence"
MALPVTALLLPLALLLHAARPGSGSGAQAAQVQLVQSGAEVKKPGASVKVSCKASGYSFPDYYINWVRQAPGQGLEWMGWIYFASGNSEYNQKFTGRVTMTRDTSSSTAYMELSSLRSEDTAVYFCASLYDYDWYFDVWGQGTMVTVSSGGGGSGGGGSGGGGSDIVMTQTPLSLSVTPGEPASISCKSSQSLVHSNGNTYLHWYLQKPGQSPQLLIYKVSNRFSGVPDRFSGSGSGADFTLKISRVEAEDVGVYYCAETSHVPWTFGQGTKLEIKRSDPASGAGSGSGSAPYEWSNSSDPLLVSVIGNPSNSWPSPTEPSSKTGNPRHLHILIGTSVVIILFILLFFLLHRWCSNKKNAAVMDQESAGNRTANSEDSDEQDPQEVTYTQLNHCVFTQRKITRPSQRPKTPPTDIIVYAELPNAESRSKVVSCPSHG

SEQ ID NO: 1499 - protein, 437 aa, Artificial Sequence
  source: /note="Description of Artificial Sequence: Synthetic Chimeric Antigen Receptor sequence"
MALPVTALLLPLALLLHAARPGSGSGAQAAQVQLVQSGAEVKKPGASVKVSCKASGYSFPDYYINWVRQAPGQGLEWMGWIYFASGNSEYNQKFTGRVTMTRDTSSSTAYMELSSLRSEDTAVYFCASLYDYDWYFDVWGQGTMVTVSSGGGGSGGGGSGGGGSDIVMTQTPLSLSVTPGEPASISCKSSQSLVHSNGNTYLHWYLQKPGQSPQLLIYKVSNRFSGVPDRFSGSGSGADFTLKISRVEAEDVGVYYCAETSHVPWTFGQGTKLEIKRSDPASGAGSGSGSAERRAEVPTAHPSPSPRPAGQFQTLVVGVVGGLLGSLVLLVWVLAVICSRAARGTIGARRTGQPLKEDPSAVPVFSVDYGELDFQWREKTPEPPVPCVPEQTEYATIVFPSGMGTSSPARRGSADGPRSAQPLRPEDGHCSWPLSHG

SEQ ID NO: 1500 - protein, 438 aa, Artificial Sequence
  source: /note="Description of Artificial Sequence: Synthetic Chimeric Antigen Receptor sequence"
MALPVTALLLPLALLLHAARPGSGSGAQAAQVQLVQSGAEVKKPGASVKVSCKASGYSFPDYYINWVRQAPGQGLEWMGWIYFASGNSEYNQKFTGRVTMTRDTSSSTAYMELSSLRSEDTAVYFCASLYDYDWYFDVWGQGTMVTVSSGGGGSGGGGSGGGGSDIVMTQTPLSLSVTPGEPASISCKSSQSLVHSNGNTYLHWYLQKPGQSPQLLIYKVSNRFSGVPDRFSGSGSGADFTLKISRVEAEDVGVYYCAETSHVPWTFGQGTKLEIKRSDPASGAGSGSGSAPYEWSDPSDPLLVSVTGNPSSSWPSPTEPSSKSGNPRHLHILIGTSVVIILFILLLFFLLHLWCSNKKNAAVMDQEPAGNRTANSEDSDEQDPEEVTYAQLDHCVFTQRKITRPSQRPKTPPTDTILYTELPNAKPRSKVVSCPSHG

SEQ ID NO: 1501 - protein, 441 aa, Artificial Sequence
  source: /note="Description of Artificial Sequence: Synthetic Chimeric Antigen Receptor sequence"
MALPVTALLLPLALLLHAARPGSGSGAQAAQVQLVQSGAEVKKPGASVKVSCKASGYSFPDYYINWVRQAPGQGLEWMGWIYFASGNSEYNQKFTGRVTMTRDTSSSTAYMELSSLRSEDTAVYFCASLYDYDWYFDVWGQGTMVTVSSGGGGSGGGGSGGGGSDIVMTQTPLSLSVTPGEPASISCKSSQSLVHSNGNTYLHWYLQKPGQSPQLLIYKVSNRFSGVPDRFSGSGSGADFTLKISRVEAEDVGVYYCAETSHVPWTFGQGTKLEIKRSDPASGAGSGSGSAVRVILAPWKKGLIAVVIIGVIIALLIIAAKCYFLRKAKAKQMPVEMSRPAVPLLNSNNEKMSDPNMEANSHYGHNDDVGNHAMKPINDNKEPLNSDVQYTEVQVSSAESHKDLGKKDTETVYSEVRKAVPDAVESRYSRTEGSLDGTSHG

SEQ ID NO: 1502 - protein, 447 aa, Artificial Sequence
  source: /note="Description of Artificial Sequence: Synthetic Chimeric Antigen Receptor sequence"
MALPVTALLLPLALLLHAARPGSGSGAQAAQVQLVQSGAEVKKPGASVKVSCKASGYSFPDYYINWVRQAPGQGLEWMGWIYFASGNSEYNQKFTGRVTMTRDTSSSTAYMELSSLRSEDTAVYFCASLYDYDWYFDVWGQGTMVTVSSGGGGSGGGGSGGGGSDIVMTQTPLSLSVTPGEPASISCKSSQSLVHSNGNTYLHWYLQKPGQSPQLLIYKVSNRFSGVPDRFSGSGSGADFTLKISRVEAEDVGVYYCAETSHVPWTFGQGTKLEIKRSDPASGAGSGSGSAQAVTTTTQRPSSMTTTWRLSSTTTTTGLRVTQGKRRSDSWHISLETAVGVAVAVTVLGIMILGLICLLRWRRRKGQQRTKATTPAREPFQNTEEPYENIRNEGQNTDPKLNPKDDGIVYASLALSSSTSPKAPPSHRPLKSPQNETLYSVLKASHG

SEQ ID NO: 1503 - protein, 449 aa, Artificial Sequence
  source: /note="Description of Artificial Sequence: Synthetic Chimeric Antigen Receptor sequence"
MALPVTALLLPLALLLHAARPGSGSGAQAAQVQLVQSGAEVKKPGASVKVSCKASGYSFPDYYINWVRQAPGQGLEWMGWIYFASGNSEYNQKFTGRVTMTRDTSSSTAYMELSSLRSEDTAVYFCASLYDYDWYFDVWGQGTMVTVSSGGGGSGGGGSGGGGSDIVMTQTPLSLSVTPGEPASISCKSSQSLVHSNGNTYLHWYLQKPGQSPQLLIYKVSNRFSGVPDRFSGSGSGADFTLKISRVEAEDVGVYYCAETSHVPWTFGQGTKLEIKRSDPASGAGSGSGSAPCVWSNSSDPLLVSVTGNPSSSWPSPTEPSSKSGICRHLHVLIGTSVVIFLFILLLFFLLYRWCSNKKNAAVMDQEPAGDRTVNRQDSDEQDPQEVTYAQLDHCVFIQRKISRPSQRPKTPLTDTSVYTELPNAEPRSKVVSCPRAPQSGLEGVFSHG

SEQ ID NO: 1504 - protein, 449 aa, Artificial Sequence
  source: /note="Description of Artificial Sequence: Synthetic Chimeric Antigen Receptor sequence"
MALPVTALLLPLALLLHAARPGSGSGAQAAQVQLVQSGAEVKKPGASVKVSCKASGYSFPDYYINWVRQAPGQGLEWMGWIYFASGNSEYNQKFTGRVTMTRDTSSSTAYMELSSLRSEDTAVYFCASLYDYDWYFDVWGQGTMVTVSSGGGGSGGGGSGGGGSDIVMTQTPLSLSVTPGEPASISCKSSQSLVHSNGNTYLHWYLQKPGQSPQLLIYKVSNRFSGVPDRFSGSGSGADFTLKISRVEAEDVGVYYCAETSHVPWTFGQGTKLEIKRSDPASGAGSGSGSALQNEGTGTSRPVSQVTLAAVGGAGATALAFLSFCIIFIIVRSCRKKSARPAAGVGDTGMEDAKAIRGSASQGPLTESWKDGNPLKKPPPAVAPSSGEEGELHYATLSFHKVKPQDPQGQEATDSEYSEIKIHKRETAETQACLRNHNPSSKEVRGSHG

SEQ ID NO: 1505 - protein, 465 aa, Artificial Sequence
  source: /note="Description of Artificial Sequence: Synthetic Chimeric Antigen Receptor sequence"
MALPVTALLLPLALLLHAARPGSGSGAQAAQVQLVQSGAEVKKPGASVKVSCKASGYSFPDYYINWVRQAPGQGLEWMGWIYFASGNSEYNQKFTGRVTMTRDTSSSTAYMELSSLRSEDTAVYFCASLYDYDWYFDVWGQGTMVTVSSGGGGSGGGGSGGGGSDIVMTQTPLSLSVTPGEPASISCKSSQSLVHSNGNTYLHWYLQKPGQSPQLLIYKVSNRFSGVPDRFSGSGSGADFTLKISRVEAEDVGVYYCAETSHVPWTFGQGTKLEIKRSDPASGAGSGSGSAGTSRNRTGLTAAGITGLVLSILVLAAAAALLHYARARRKPGGLSATGTSSHSPSECQEPSSSRPSRIDPQEPTHSKPLAPMELEPMYSNANPGDSNPIYSQIWSIQHTKENSANCPMMHQEHEELTVLYSELKKTHPDDSAGEASSRGRAHEEDDEENYENVPRVLLASDHSHG

SEQ ID NO: 1506 - protein, 466 aa, Artificial Sequence
  source: /note="Description of Artificial Sequence: Synthetic Chimeric Antigen Receptor sequence"
MALPVTALLLPLALLLHAARPGSGSGAQAAQVQLVQSGAEVKKPGASVKVSCKASGYSFPDYYINWVRQAPGQGLEWMGWIYFASGNSEYNQKFTGRVTMTRDTSSSTAYMELSSLRSEDTAVYFCASLYDYDWYFDVWGQGTMVTVSSGGGGSGGGGSGGGGSDIVMTQTPLSLSVTPGEPASISCKSSQSLVHSNGNTYLHWYLQKPGQSPQLLIYKVSNRFSGVPDRFSGSGSGADFTLKISRVEAEDVGVYYCAETSHVPWTFGQGTKLEIKRSDPASGAGSGSGSAGPSGDPSLSPTGSTPTPGPEDQPLTPTGLDPQSGLGRHLGVVTGVSVAFVLLLFLLLFLLLRHRHQSKHRTSAHFYRPAGAAGPEPKDQGLQKRASPVADIQEEILNAAVKDTQPKDGVEMDARAAASEAPQDVTYAQLHSLTLRREATEPPPSQEREPPAEPSIYAPLAIHSHG

SEQ ID NO: 1507 - protein, 469 aa, Artificial Sequence
  source: /note="Description of Artificial Sequence: Synthetic Chimeric Antigen Receptor sequence"
MALPVTALLLPLALLLHAARPGSGSGAQAAQVQLVQSGAEVKKPGASVKVSCKASGYSFPDYYINWVRQAPGQGLEWMGWIYFASGNSEYNQKFTGRVTMTRDTSSSTAYMELSSLRSEDTAVYFCASLYDYDWYFDVWGQGTMVTVSSGGGGSGGGGSGGGGSDIVMTQTPLSLSVTPGEPASISCKSSQSLVHSNGNTYLHWYLQKPGQSPQLLIYKVSNRFSGVPDRFSGSGSGADFTLKISRVEAEDVGVYYCAETSHVPWTFGQGTKLEIKRSDPASGAGSGSGSAPYEWSDASDPLPVSVTGNPSSSWPSPTEPSFKTGIARHLHAVIRYSVAIILFTILPFFLLHRWCSKKKDAAVMNQEPAGHRTVNREDSDEQDPQEVTYAQLDHCIFTQRKITGPSQRSKRPSTDTSVCIELPNAEPRALSPAHEHHSQALMGSSRETTALSQTQLASSHVPAAGISHG

SEQ ID NO: 1508 - protein, 469 aa, Artificial Sequence
  source: /note="Description of Artificial Sequence: Synthetic Chimeric Antigen Receptor sequence"
MALPVTALLLPLALLLHAARPGSGSGAQAAQVQLVQSGAEVKKPGASVKVSCKASGYSFPDYYINWVRQAPGQGLEWMGWIYFASGNSEYNQKFTGRVTMTRDTSSSTAYMELSSLRSEDTAVYFCASLYDYDWYFDVWGQGTMVTVSSGGGGSGGGGSGGGGSDIVMTQTPLSLSVTPGEPASISCKSSQSLVHSNGNTYLHWYLQKPGQSPQLLIYKVSNRFSGVPDRFSGSGSGADFTLKISRVEAEDVGVYYCAETSHVPWTFGQGTKLEIKRSDPASGAGSGSGSAPYEWSDPSDPLLVSVTGNSSSSSSSPTEPSSKTGIRRHLHILIGTSVAIILFIILFFFLLHCCCSNKKNAAVMDQEPAGDRTVNREDSDDQDPQEVTYAQLDHCVFTQTKITSPSQRPKTPPTDTTMYMELPNAKPRSLSPAHKHHSQALRGSSRETTALSQNRVASSHVPAAGISHG

SEQ ID NO: 1509 - protein, 473 aa, Artificial Sequence
  source: /note="Description of Artificial Sequence: Synthetic Chimeric Antigen Receptor sequence"
MALPVTALLLPLALLLHAARPGSGSGAQAAQVQLVQSGAEVKKPGASVKVSCKASGYSFPDYYINWVRQAPGQGLEWMGWIYFASGNSEYNQKFTGRVTMTRDTSSSTAYMELSSLRSEDTAVYFCASLYDYDWYFDVWGQGTMVTVSSGGGGSGGGGSGGGGSDIVMTQTPLSLSVTPGEPASISCKSSQSLVHSNGNTYLHWYLQKPGQSPQLLIYKVSNRFSGVPDRFSGSGSGADFTLKISRVEAEDVGVYYCAETSHVPWTFGQGTKLEIKRSDPASGAGSGSGSAGPSMGSSPPPTGPISTPAGPEDQPLTPTGSDPQSGLGRHLGVVIGILVAVVLLLLLLLLLFLILRHRRQGKHWTSTQRKADFQHPAGAVGPEPTDRGLQWRSSPAADAQEENLYAAVKDTQPEDGVEMDTRAAASEAPQDVTYAQLHSLTLRRKATEPPPSQEREPPAEPSIYATLAIHSHG

SEQ ID NO: 1510 - protein, 500 aa, Artificial Sequence
  source: /note="Description of Artificial Sequence: Synthetic Chimeric Antigen Receptor sequence"
MALPVTALLLPLALLLHAARPGSGSGAQAAQVQLVQSGAEVKKPGASVKVSCKASGYSFPDYYINWVRQAPGQGLEWMGWIYFASGNSEYNQKFTGRVTMTRDTSSSTAYMELSSLRSEDTAVYFCASLYDYDWYFDVWGQGTMVTVSSGGGGSGGGGSGGGGSDIVMTQTPLSLSVTPGEPASISCKSSQSLVHSNGNTYLHWYLQKPGQSPQLLIYKVSNRFSGVPDRFSGSGSGADFTLKISRVEAEDVGVYYCAETSHVPWTFGQGTKLEIKRSDPASGAGSGSGSAKNESAASSTGKTPAAEETVTTILGMLASPYHYLIIIVVLVIILAVVVVGFSCRKKFISYLKGICSGGGGGPERVHRVLFRRRSCPSRVPGAEDNARNETLSNRYLQPTQVSEQEIQGQELAELTGVTVELPEEPQRLLEQAEAEGCQRRRLLVPVNDADSADISTLLDASATLEEGHAKETIQDQLVGSEKLFYEEDEAGSATSCLSHG

SEQ ID NO: 1511 - protein, 506 aa, Artificial Sequence
  source: /note="Description of Artificial Sequence: Synthetic Chimeric Antigen Receptor sequence"
MALPVTALLLPLALLLHAARPGSGSGAQAAQVQLVQSGAEVKKPGASVKVSCKASGYSFPDYYINWVRQAPGQGLEWMGWIYFASGNSEYNQKFTGRVTMTRDTSSSTAYMELSSLRSEDTAVYFCASLYDYDWYFDVWGQGTMVTVSSGGGGSGGGGSGGGGSDIVMTQTPLSLSVTPGEPASISCKSSQSLVHSNGNTYLHWYLQKPGQSPQLLIYKVSNRFSGVPDRFSGSGSGADFTLKISRVEAEDVGVYYCAETSHVPWTFGQGTKLEIKRSDPASGAGSGSGSAGHSGGSSLPPTGPPSTPGLGRYLEVLIGVSVAFVLLLFLLLFLLLRRQRHSKHRTSDQRKTDFQRPAGAAETEPKDRGLLRRSSPAADVQEENLYAAVKDTQSEDRVELDSQSPHDEDPQAVTYAPVKHSSPRREMASPPSSLSGEFLDTKDRQVEEDRQMDTEAAASEASQDVTYAQLHSLTLRRKATEPPPSQEGEPPAEPSIYATLAIHSHG

SEQ ID NO: 1512 - protein, 515 aa, Artificial Sequence
  source: /note="Description of Artificial Sequence: Synthetic Chimeric Antigen Receptor sequence"
MALPVTALLLPLALLLHAARPGSGSGAQAAQVQLVQSGAEVKKPGASVKVSCKASGYSFPDYYINWVRQAPGQGLEWMGWIYFASGNSEYNQKFTGRVTMTRDTSSSTAYMELSSLRSEDTAVYFCASLYDYDWYFDVWGQGTMVTVSSGGGGSGGGGSGGGGSDIVMTQTPLSLSVTPGEPASISCKSSQSLVHSNGNTYLHWYLQKPGQSPQLLIYKVSNRFSGVPDRFSGSGSGADFTLKISRVEAEDVGVYYCAETSHVPWTFGQGTKLEIKRSDPASGAGSGSGSAVYSLPQLLGPSCSWEAEGLHCRCSFRAWPAPSLCWRLEEKPLEGNSSQGSFKVNSSSPGPWANSSLILHGGLNSDLKVSCKAWNIYGSQSGSVLLLQGRSNLGTGVVPAALGGAGVMALLCICLCLIFFLIVKARRKQAAGRPEKMDDEDPIMGTITSGSRKKPWPDSPGDQASPPGDAPPLEEQKELHYASLSFSEMKSREPKDQEAPSTTEYSEIKTSKSHG

SEQ ID NO: 1513 - protein, 524 aa, Artificial Sequence
  source: /note="Description of Artificial Sequence: Synthetic Chimeric Antigen Receptor sequence"
MALPVTALLLPLALLLHAARPGSGSGAQAAQVQLVQSGAEVKKPGASVKVSCKASGYSFPDYYINWVRQAPGQGLEWMGWIYFASGNSEYNQKFTGRVTMTRDTSSSTAYMELSSLRSEDTAVYFCASLYDYDWYFDVWGQGTMVTVSSGGGGSGGGGSGGGGSDIVMTQTPLSLSVTPGEPASISCKSSQSLVHSNGNTYLHWYLQKPGQSPQLLIYKVSNRFSGVPDRFSGSGSGADFTLKISRVEAEDVGVYYCAETSHVPWTFGQGTKLEIKRSDPASGAGSGSGSAGSLEGPRPSPTRSVSTAAGPEDQPLMPTGSVPHSGLRRHWEVLIGVLVVSILLLSLLLFLLLQHWRQGKHRTLAQRQADFQRPPGAAEPEPKDGGLQRRSSPAADVQGENFCAAVKNTQPEDGVEMDTRQSPHDEDPQAVTYAKVKHSRPRREMASPPSPLSGEFLDTKDRQAEEDRQMDTEAAASEAPQDVTYAQLHSFTLRQKATEPPPSQEGASPAEPSVYATLAIHSHG

SEQ ID NO: 1514 - protein, 533 aa, Artificial Sequence
  source: /note="Description of Artificial Sequence: Synthetic Chimeric Antigen Receptor sequence"
MALPVTALLLPLALLLHAARPGSGSGAQAAQVQLVQSGAEVKKPGASVKVSCKASGYSFPDYYINWVRQAPGQGLEWMGWIYFASGNSEYNQKFTGRVTMTRDTSSSTAYMELSSLRSEDTAVYFCASLYDYDWYFDVWGQGTMVTVSSGGGGSGGGGSGGGGSDIVMTQTPLSLSVTPGEPASISCKSSQSLVHSNGNTYLHWYLQKPGQSPQLLIYKVSNRFSGVPDRFSGSGSGADFTLKISRVEAEDVGVYYCAETSHVPWTFGQGTKLEIKRSDPASGAGSGSGSAVHKESGNGHNIWVILVVTLVVPLLLVAVLIVCCCIGSGCGGDPKCMDRVCFWRLGLLRGPGAEDNAHNEILSNADSLSTFVSEQQMESQEPADLTGVTVQSPGEAQCLLGPAEAEGSQRRRLLVPANGADPTETLMLFFDKFANIVPFDSWDQLMRQLDLTKNEIDVVRAGTAGPGDALYAMLMKWVNKTGRNASIHTLLDALERMEERHAKEKIQDLLVDSGKFIYLEDGTGSAVSLESHG

SEQ ID NO: 1515 - protein, 540 aa, Artificial Sequence
  source: /note="Description of Artificial Sequence: Synthetic Chimeric Antigen Receptor sequence"
MALPVTALLLPLALLLHAARPGSGSGAQAAQVQLVQSGAEVKKPGASVKVSCKASGYSFPDYYINWVRQAPGQGLEWMGWIYFASGNSEYNQKFTGRVTMTRDTSSSTAYMELSSLRSEDTAVYFCASLYDYDWYFDVWGQGTMVTVSSGGGGSGGGGSGGGGSDIVMTQTPLSLSVTPGEPASISCKSSQSLVHSNGNTYLHWYLQKPGQSPQLLIYKVSNRFSGVPDRFSGSGSGADFTLKISRVEAEDVGVYYCAETSHVPWTFGQGTKLEIKRSDPASGAGSGSGSAVHYPPQLLGPSCSWEAEGLHCSCSSQASPAPSLRWWLGEELLEGNSSQGSFEVTPSSAGPWANSSLSLHGGLSSGLRLRCKAWNVHGAQSGSVFQLLPGKLEHGGGLGLGAALGAGVAALLAFCSCLVVFRVKICRKEARKRAAAEQDVPSTLGPISQGHQHECSAGSSQDHPPPGAATYTPGKGEEQELHYASLSFQGLRLWEPADQEAPSTTEYSEIKIHTGQPLRGPGFGLQLEREMSGMVPKSHG

SEQ ID NO: 1516 - protein, 550 aa, Artificial Sequence
  source: /note="Description of Artificial Sequence: Synthetic Chimeric Antigen Receptor sequence"
MALPVTALLLPLALLLHAARPGSGSGAQAAQVQLVQSGAEVKKPGASVKVSCKASGYSFPDYYINWVRQAPGQGLEWMGWIYFASGNSEYNQKFTGRVTMTRDTSSSTAYMELSSLRSEDTAVYFCASLYDYDWYFDVWGQGTMVTVSSGGGGSGGGGSGGGGSDIVMTQTPLSLSVTPGEPASISCKSSQSLVHSNGNTYLHWYLQKPGQSPQLLIYKVSNRFSGVPDRFSGSGSGADFTLKISRVEAEDVGVYYCAETSHVPWTFGQGTKLEIKRSDPASGAGSGSGSAVHYSPKLLGPSCSWEAEGLHCSCSSQASPAPSLRWWLGEELLEGNSSQDSFEVTPSSAGPWANSSLSLHGGLSSGLRLRCEAWNVHGAQSGSILQLPDKKGLISTAFSNGAFLGIGITALLFLCLALIIMKILPKRRTQTETPRPRFSRHSTILDYINVVPTAGPLAQKRNQKATPNSPRTPLPPGAPSPESKKNQKKQYQLPSFPEPKSSTQAPESQESQEELHYATLNFPGVRPRPEARMPKGTQADYAEVKFQSHG

SEQ ID NO: 1517 - protein, 556 aa, Artificial Sequence
  source: /note="Description of Artificial Sequence: Synthetic Chimeric Antigen Receptor sequence"
MALPVTALLLPLALLLHAARPGSGSGAQAAQVQLVQSGAEVKKPGASVKVSCKASGYSFPDYYINWVRQAPGQGLEWMGWIYFASGNSEYNQKFTGRVTMTRDTSSSTAYMELSSLRSEDTAVYFCASLYDYDWYFDVWGQGTMVTVSSGGGGSGGGGSGGGGSDIVMTQTPLSLSVTPGEPASISCKSSQSLVHSNGNTYLHWYLQKPGQSPQLLIYKVSNRFSGVPDRFSGSGSGADFTLKISRVEAEDVGVYYCAETSHVPWTFGQGTKLEIKRSDPASGAGSGSGSAVHKESGTKHSGEAPAVEETVTSSPGTPASPCSLSGIIIGVTVAAVVLIVAVFVCKSLLWKKVLPYLKGICSGGGGDPERVDRSSQRPGAEDNVLNEIVSILQPTQVPEQEMEVQEPAEPTGVNMLSPGESEHLLEPAEAERSQRRRLLVPANEGDPTETLRQCFDDFADLVPFDSWEPLMRKLGLMDNEIKVAKAEAAGHRDTLYTMLIKWVNKTGRDASVHTLLDALETLGERLAKQKIEDHLLSSGKFMYLEGNADSAMSSHG

SEQ ID NO: 1518 - protein, 741 aa, Artificial Sequence
  source: /note="Description of Artificial Sequence: Synthetic Chimeric Antigen Receptor sequence"
MSELIKENMHMKLYMEGTVDNHHFKCTSEGEGKPYEGTQTMRIKVVEGGPLPFAFDILATSFLYGSKTFINHTQGIPDFFKQSFPEGFTWERVTTYEDGGVLTATQDTSLQDGCLIYNVKIRGVNFTSNGPVMQKKTLGWEAFTETLYPADGGLEGRNDMALKLVGGSHLIANIKTTYRSKKPAKNLKMPGVYYVDYRLERIKEANNETYVEQHEVAVARYCDLPSKLGHKLNRAEGRGSLLTCGDVEENPGPMALPVTALLLPLALLLHAARPEVQLVESGGGLVQPGRSLRLSCAASGFTFNDYAMHWVRQAPGKGLEWVSTISWNSGSIGYADSVKGRFTISRDNAKKSLYLQMNSLRAEDTALYYCAKDIQYGNYYYGMDVWGQGTTVTVSSGGGGSGGGGSGGGGSEIVLTQSPATLSLSPGERATLSCRASQSVSSYLAWYQQKPGQAPRLLIYDASNRATGIPARFSGSGSGTDFTLTISSLEPEDFAVYYCQQRSNWPITFGQGTRLEIKTTTPAPRPPTPAPTIASQPLSLRPEACRPAAGGAVHTRGLDFACDIYIWAPLAGTCGVLLLSLVITLYCKRGRKKLLYIFKQPFMRPVQTTQEEDGCSCRFPEEEEGGCELRVKFSRSADAPAYQQGQNQLYNELNLGRREEYDVLDKRRGRDPEMGGKPRRKNPQEGLYNELQKDKMAEAYSEIGMKGERRRGKGHDGLYQGLSTATKDTYDALHMQALPPR

SEQ ID NO: 1519 - protein, 1352 aa, Artificial Sequence
  source: /note="Description of Artificial Sequence: Synthetic Chimeric Antigen Receptor sequence"
MSLPVTALLLPLALLLHAARPDIQMTQTTSSLSASLGDRVTISCRASQDISKYLNWYQQKPDGTVKLLIYHTSRLHSGVPSRFSGSGSGTDYSLTISNLEQEDIATYFCQQGNTLPYTFGGGTKLEITKAGGGGSGGGGSGGGGSGGGGSEVKLQESGPGLVAPSQSLSVTCTVSGVSLPDYGVSWIRQPPRKGLEWLGVIWGSETTYYNSALKSRLTIIKDNSKSQVFLKIVINSLQTDDTAIYYCAKHYYYGGSYAMDYWGQGTSVTVSSDPTTTPAPRPPTPAPTIASQPLSLRPEACRPAAGGAVHTRGLDFACDIFWVLVVVGGVLACYSLLVTVAFIIFWVRRVKFSRSADAPAYQQGQNQLYNELNLGRREEYDVLDKRRGRDPEMGGKPRRKNPQEGLYNELQKDKMAEAYSEIGMKGERRRGKGHDGLYQGLSTATKDTYDALHMQALPPRRAEGRGSLLTCGDVEENPGPMAVPTQVLGLLLLWLTDARCDIQMTQSPSSLSASVGDRVTITCRASEDIYFNLVWYQQKPGKAPKLLIYDTNRLADGVPSRFSGSGSGTQYTLTISSLQPEDFATYYCQHYKNYPLTFGQGTKLEIKRSGGGGSGGGGSGGGGSGGGGSRSEVQLVESGGGLVQPGGSLRLSCAASGFTLSNYGMHWIRQAPGKGLEWVSSISLNGGSTYYRDSVKGRFTISRDNAKSTLYLQMNSLRAEDTAVYYCAAQDAYTGGYFDYWGQGTLVTVSSMDPAEPKSPDKTHTCPPCPAPPVAGPSVFLFPPKPKDTLMIARTPEVTCVVVDVSHEDPEVKFNWYVDGVEVHNAKTKPREEQYNSTYRVVSVLTVLHQDWLNGKEYKCKVSNKALPAPIEKTISKAKGQPREPQVYTLPPSRDELTKNQVSLTCLVKGFYPSDIAVEWESNGQPENNYKTTPPVLDSDGSFFLYSKLTVDKSRWQQGNVFSCSVMHEALHNHYTQKSLSLSPGKKDPKAVFGCIFGALVIVTVGGFIFWRKKRKDAKNNEVSFSQIKPKKSKLIRVENFEAYFKKQQADSNCGFAEEYEDLKLVGISQPKYAAELAENRGKNRYNNVLPYDISRVKLSVQTHSTDDYINANYMPGYHSKKDFIATQGPLPNTLKDFWRMVWEKNVYAIIMLTKCVEQGRTKCEEYWPSKQAQDYGDITVAMTSEIVLPEWTIRDFTVKNIQTSESHPLRQFHFTSWPDHGVPDTTDLLINFRYLVRDYMKQSPPESPILVHCSAGVGRTGTFIAIDRLIYQIENENTVDVYGIVYDLRMHRPLMVQTEDQYVFLNQCVLDIVRSQKDSKVDLIYQNTTAMTIYENLAPVTTFGKTNGYIA

SEQ ID NO: 1520 - protein, 1341 aa, Artificial Sequence
  source: /note="Description of Artificial Sequence: Synthetic Chimeric Antigen Receptor sequence"
MSLPVTALLLPLALLLHAARPDIQMTQTTSSLSASLGDRVTISCRASQDISKYLNWYQQKPDGTVKLLIYHTSRLHSGVPSRFSGSGSGTDYSLTISNLEQEDIATYFCQQGNTLPYTEGGGTKLEITKAGGGGSGGGGSGGGGSGGGGSEVKLQESGPGLVAPSQSLSVTCTVSGVSLPDYGVSWIRQPPRKGLEWLGVIWGSETTYYNSALKSRLTIIKDNSKSQVFLKMNSLQTDDTAIYYCAKHYYYGGSYAMDYWGQGTSVTVSSDPTTTPAPRPPTPAPTIASQPLSLRPEACRPAAGGAVHTRGLDFACDIFWVLVVVGGVLACYSLLVTVAFIIEWVRRVKFSRSADAPAYQQGQNQLYNELNLGRREEYDVLDKRRGRDPEMGGKPRRKNPQEGLYNELQKDKMAEAYSEIGMKGERRRGKGHDGLYQGLSTATKDTYDALHMQALPPRRAEGRGSLLTCGDVEENPGPMETDTLLLWVLLLWVPGSTGQVTLKESGPGILKPSQTLSLTCSFSGESLSTSGMGVGWIRQPSGKGLEWLAHIWWDDDVYYNPSLKNQLTISKDASRDQVFLKITNLDTADTATYYCVRRRATGTGEDYWGQGTTLTVSSGGGGSGGGGSGGGGSNIVMTQSHKFMSTSVGDRVSIACKASQDVGTAVAWYQQKPGQSPKLLIYWTSTRHTGVPDRFTGSGSGTDFTLTITNVQSEDLADYFCHQYNSYNTFGSGTRLELKRSDPAEPKSPDKTHTCPPCPAPPVAGPSVFLEPPKPKDTLMIARTPEVTCVVVDVSHEDPEVKFNWYVDGVEVHNAKTKPREEQYNSTYRVVSVLTVLHQDWLNGKEYKCKVSNKALPAPIEKTISKAKGQPREPQVYTLPPSRDELTKNQVSLTCLVKGFYPSDIAVEWESNGQPENNYKTTPPVLDSDGSFFLYSKLTVDKSRWQQGNVESCSVMHEALHNHYTQKSLSLSPGKKDPKAVFGCIFGALVIVTVGGFIFWRKKRKDAKNNEVSFSQIKPKKSKLIRVENFEAYFKKQQADSNCGFAEEYEDLKLVGISQPKYAAELAENRGKNRYNNVLPYDISRVKLSVQTHSTDDYINANYMPGYHSKKDFIATQGPLPNTLKDFWRMVWEKNVYAIIMLTKCVEQGRTKCEEYWPSKQAQDYGDITVAMTSEIVLPEWTIRDFTVKNIQTSESHPLRQFHFTSWPDHGVPDTTDLLINFRYLVRDYMKQSPPESPILVHCSAGVGRTGTFIAIDRLIYQIENENTVDVYGIVYDLRMHRPLMVQTEDQYVFLNQCVLDIVRSQKDSKVDLIYQNTTAMTIYENLAPVTTFGKTNGYIA

SEQ ID NO: 1521 - protein, 1342 aa, Artificial Sequence [sequence omitted]

SEQ ID NO: 1522 - protein, 1341 aa, Artificial Sequence
  source: /note="Description of Artificial Sequence: Synthetic Chimeric Antigen Receptor sequence"
MSLPVTALLLPLALLLHAARPDIQMTQTTSSLSASLGDRVTISCRASQDISKYLNWYQQKPDGTVKLLIYHTSRLHSGVPSRFSGSGSGTDYSLTISNLEQEDIATYFCQQGNTLPYTEGGGTKLEITKAGGGGSGGGGSGGGGSGGGGSEVKLQESGPGLVAPSQSLSVTCTVSGVSLPDYGVSWIRQPPRKGLEWLGVIWGSETTYYNSALKSRLTIIKDNSKSQVFLKMNSLQTDDTAIYYCAKHYYYGGSYAMDYWGQGTSVTVSSDPTTTPAPRPPTPAPTIASQPLSLRPEACRPAAGGAVHTRGLDFACDIFWVLVVVGGVLACYSLLVTVAFIIFWVRRVKFSRSADAPAYQQGQNQLYNELNLGRREEYDVLDKRRGRDPEMGGKPRRKNPQEGLYNELQKDKMAEAYSEIGMKGERRRGKGHDGLYQGLSTATKDTYDALHMQALPPRRAEGRGSLLTCGDVEENPGPMETDTLLLWVLLLWVPGSTGQVQLQESGPGLVKPSQTLSITCTVSGFSLASYNIHWVRQPPGKGLEWLGVIWAGGSTNYNSALMSRLTISKDNSKNQVFLKMSSLTAADTAVYYCAKRSDDYSWFAYWGQGTLVTVSSGGGGSGGGGSGGGGSENQMTQSPSSLSASVGDRVTMTCRASSSVSSSYLHWYQQKSGKAPKVWIYSTSNLASGVPSRFSGSGSGTDYTLTISSLQPEDFATYYCQQYSGYPITEGQGTKVEIKRSDPAEPKSPDKTHTCPPCPAPPVAGPSVFLFPPKPKDTLMIARTPEVTCVVVDVSHEDPEVKFNWYVDGVEVHNAKTKPREEQYNSTYRVVSVLTVLHQDWLNGKEYKCKVSNKALPAPIEKTISKAKGQPREPQVYTLPPSRDELTKNQVSLTCLVKGFYPSDIAVEWESNGQPENNYKTTPPVLDSDGSFFLYSKLTVDKSRWQQGNVFSCSVMHEALHNHYTQKSLSLSPGKKDPKAVFGCIFGALVIVTVGGFIFWRKKRKDAKNNEVSFSQIKPKKSKLIRVENFEAYFKKQQADSNCGFAEEYEDLKLVGISQPKYAAELAENRGKNRYNNVLPYDISRVKLSVQTHSTDDYINANYMPGYHSKKDFIATQGPLPNTLKDFWRMVWEKNVYAIIMLTKCVEQGRTKCEEYWPSKQAQDYGDITVAMTSEIVLPEWTIRDFTVKNIQTSESHPLRQFHFTSWPDHGVPDTTDLLINFRYLVRDYMKQSPPESPILVHCSAGVGRTGTFIAIDRLIYQIENENTVDVYGIVYDLRMHRPLMVQTEDQYVFLNQCVLDIVRSQKDSKVDLIYQNTTAMTIYENLAPVTTEGKTNGYIA

SEQ ID NO: 1523 - protein, 1341 aa, Artificial Sequence [sequence omitted]

SEQ ID NO: 1524 - protein, 1113 aa, Artificial Sequence
  source: /note="Description of Artificial Sequence: Synthetic Chimeric Antigen Receptor sequence"
MSLPVTALLLPLALLLHAARPDIQMTQTTSSLSASLGDRVTISCRASQDISKYLNWYQQKPDGTVKLLIYHTSRLHSGVPSRFSGSGSGTDYSLTISNLEQEDIATYFCQQGNTLPYTFGGGTKLEITKAGGGGSGGGGSGGGGSGGGGSEVKLQESGPGLVAPSQSLSVTCTVSGVSLPDYGVSWIRQPPRKGLEWLGVIWGSETTYYNSALKSRLTIIKDNSKSQVFLKMNSLQTDDTAIYYCAKHYYYGGSYAMDYWGQGTSVTVSSDPTTTPAPRPPTPAPTIASQPLSLRPEACRPAAGGAVHTRGLDFACDIFWVLVVVGGVLACYLLVTVAFIIFWVRRVKFSRSADAPAYQQGQNQLYNELNLGRREEYDVLDKRRGRDPEMGGKPRRKNPQEGLYNELQKDKMAEAYSEIGMKGERRRGKGHDGLYQGLSTATKDTYDALHMQALPPRRAEGRGSLLTCGDVEENPGPMAVPTQVLGLLLLWLTDARCDIQMTQSPSSLSASVGDRVTITCRASEDIYFNLVWYQQKPGKAPKLLIYDTNRLADGVPSRFSGSGSGTQYTLTISSLQPEDFATYYCQHYKNYPLTFGQGTKLEIKRSGGGGSGGGGSGGGGSGGGGSRSEVQLVESGGGLVQPGGSLRLSCAASGFTLSNYGMHWIRQAPGKGLEWVSSISLNGGSTYYRDSVKGRFTISRDNAKSTLYLQMNSLRAEDTAVYYCAAQDAYTGGYFDYWGQGTLVTVSSMDPATTTKPVLRTPSPVHPTGTSQPQRPEDCRPRGSVKGTGLDFACDIYWAPLAGICVALLLSLIITLICYHRSRKRVCKSGGGSFWEEFESLQKQEVKNLHQRLEGQRPENKGKNRYKNILPFDHSRVILQGRDSNIPGSDYINANYIKNQLLGPDENAKTYIASQGCLEATVNDFWQMAWQENSRVIVMTTREVEKGRNKCVPYWPEVGMQRAYGPYSVTNCGEHDTTEYKLRTLQVSPLDNGDLIREIWHYQYLSWPDHGVPSEPGGVLSFLDQINQRQESLPHAGPIIVHCSAGIGRIGTIIVIDMLMENISTKGLDCDIDIQKTIQMVRAQRSGMVQTEAQYKFIYVAIAQFIETTKKKL

SEQ ID NO: 1525 - protein, 918 aa, Artificial Sequence
  source: /note="Description of Artificial Sequence: Synthetic Chimeric Antigen Receptor sequence"
MSLPVTALLLPLALLLHAARPDIQMTQTTSSLSASLGDRVTISCRASQDISKYLNWYQQKPDGTVKLLIYHTSRLHSGVPSRFSGSGSGTDYSLTISNLEQEDIATYFCQQGNTLPYTFGGGTKLEITKAGGGGSGGGGSGGGGSGGGGSEVKLQESGPGLVAPSQSLSVTCTVSGVSLPDYGVSWIRQPPRKGLEWLGVIWGSETTYYNSALKSRLTIIKDNSKSQVFLKMNSLQTDDTAIYYCAKHYYYGGSYAMDYWGQGTSVTVSSDPITTPAPRPPTPAPTIASQPLSLRPEACRPAAGGAVHTRGLDFACDIFWVLVVVGGVLACYSLLVTVAFIIFWVRRVKFSRSADAPAYQQGQNQLYNELNLGRREEYDVLDKRRGRDPEMGGKPRRKNPQEGLYNELQKDKMAEAYSEIGMKGERRRGKGHDGLYQGLSTATKDTYDALHMQALPPRRAEGRGSLLTCGDVEENPGPMAVPTQVLGLLLLWLTDARCDIQMTQSPSSLSASVGDRVTITCRASEDIYFNLVWYQQKPGKAPKLLIYDTNRLADGVPSRFSGSGSGTQYTLTISSLQPEDFATYYCQHYKNYPLTFGQGTKLEIKRSGGGGSGGGGSGGGGSGGGGSRSEVQLVESGGGLVQPGGSLRLSCAASGFTLSNYGMHWIRQAPGKGLEWVSSISLNGGSTYYRDSVKGRFTISRDNAKSTLYLQMNSLRAEDTAVYYCAAQDAYTGGYFDYWGQGTLVTVSSMDPATTTKPVLRTPSPVHPTGTSQPQRPEDCRPRGSVKGTGLDFACDILIGVSVVFLFCLLLLVLFCLHRQNQIKQGPPRSKDEEQKPQQRPDLAVDVLERTADKATVNGLPEKDRETDTSALAAGSSQEVTYAQLDHWALTQRTARAVSPQSTKPMAESITYAAVARH

SEQ ID NO: 1526 - protein, 1114 aa, Artificial Sequence
  source: /note="Description of Artificial Sequence: Synthetic Chimeric Antigen Receptor sequence"
MSLPVTALLLPLALLLHAARPDIQMTQTTSSLSASLGDRVTISCRASQDISKYLNWYQQKPDGTVKLLIYHTSRLHSGVPSRFSGSGSGTDYSLTISNLEQEDIATYFCQQGNTLPYTFGGGTKLEITKAGGGGSGGGGSGGGGSGGGGSEVKLQESGPGLVAPSQSLSVTCTVSGVSLPDYGVSWIRQPPRKGLEWLGVIWGSETTYYNSALKSRLTIIKDNSKSQVFLKMNSLQTDDTAIYYCAKHYYYGGSYAMDYWGQGTSVTVSSDPTTTPAPRPPTPAPTIASQPLSLRPEACRPAAGGAVHTRGLDFACDIFWVLVVVGGVLACYSLLVTVAFIIFWVRRVKFSRSADAPAYQQGQNQLYNELNLGRREEYDVLDKRRGRDPEMGGKPRRKNPQEGLYNELQKDKMAEAYSEIGMKGERRRGKGHDGLYQGLSTATKDTYDALHMQALPPRRAEGRGSLLTCGDVEENPGPMAVPTQVLGLLLLWLTDARCDIQMTQSPSSLSASVGDRVTITCRASEDIYFNLVWYQQKPGKAPKLLIYDTNRLADGVPSRFSGSGSGTQYTLTISSLQPEDFATYYCQHYKNYPLTFGQGTKLEIKRSGGGGSGGGGSGGGGSGGGGSRSEVQLVESGGGLVQPGGSLRLSCAASGFTLSNYGMHWIRQAPGKGLEWVSSISLNGGSTYYRDSVKGRFTISRDNAKSTLYLQMNSLRAEDTAVYYCAAQDAYTGGYFDYWGQGTLVTVSSMDPATTTKPVLRTPSPVHPTGTSQPQRPEDCRPRGSVKGTGLDFACDIYWAPLAGICVALLLSLIITLICYHRSRKRVCKSGGGSFWEEFESLQKQEVKNLHQRLEGQRPENKGKNRYKNILPFDHSRVILQGRDSNIPGSDYINANYIKNQLLGPDENAKTYIASQGCLEATVNDFWQMAWQENSRVIVMTTREVEKGRNKCVPYWPEVGMQRAYGPYSVTNCGEHDTTEYKLRTLQVSPLDNGDLIREIWHYQYLSWPDHGVPSEPGGVLSFLDQINQRQESLPHAGPIIVHCSAGIGRTGTIIVIDMLMENISTKGLDCDIDIQKTIQMVRAQRSGMVQTEAQYKFIYVAIAQFIETTKKKL

SEQ ID NO: 1527 - protein, 918 aa, Artificial Sequence
  source: /note="Description of Artificial Sequence: Synthetic Chimeric Antigen Receptor sequence"
MSLPVTALLLPLALLLHAARPDIQMTQTTSSLSASLGDRVTISCRASQDISKYLNWYQQKPDGTVKLLIYHTSRLHSGVPSRFSGSGSGTDYSLTISNLEQEDIATYFCQQGNTLPYTFGGGTKLEITKAGGGGSGGGGSGGGGSGGGGSEVKLQESGPGLVAPSQSLSVTCTVSGVSLPDYGVSWIRQPPRKGLEWLGVIWGSETTYYNSALKSRLTIIKDNSKSQVFLKMNSLQTDDTAIYYCAKHYYYGGSYAMDYWGQGTSVTVSSDPTTTPAPRPPTPAPTIASQPLSLRPEACRPAAGGAVHTRGLDFACDIFWVLVVVGGVLACYSLLVTVAFIIFWVRRVKFSRSADAPAYQQGQNQLYNELNLGRREEYDVLDKRRGRDPEMGGKPRRKNPQEGLYNELQKDKMAEAYSEIGMKGERRRGKGHDGLYQGLSTATKDTYDALHMQALPPRRAEGRGSLLTCGDVEENPGPMAVPTQVLGLLLLWLTDARCDIQMTQSPSSLSASVGDRVTITCRASEDIYFNLVWYQQKPGKAPKLLIYDTNRLADGVPSRFSGSGSGTQYTLTISSLQPEDFATYYCQHYKNYPLTFGQGTKLEIKRSGGGGSGGGGSGGGGSGGGGSRSEVQLVESGGGLVQPGGSLRLSCAASGFTLSNYGMHWIRQAPGKGLEWVSSISLNGGSTYYRDSVKGRFTISRDNAKSTLYLQMNSLRAEDTAVYYCAAQDAYTGGYFDYWGQGTLVTVSSMDPATTTKPVLRTPSPVHPTGTSQPQRPEDCRPRGSVKGTGLDFACDILIGVSVVFLFCLLLLVLFCLHRQNQIKQGPPRSKDEEQKPQQRPDLAVDVLERTADKATVNGLPEKDRETDTSALAAGSSQEVTYAQLDHWALTQRTARAVSPQSTKPMAESITYAAVARH

SEQ ID NO: 1528 - protein, 1362 aa, Artificial Sequence
  source: /note="Description of Artificial Sequence: Synthetic Chimeric Antigen Receptor sequence"
MSLPVTALLLPLALLLHAARPDIQMTQTTSSLSASLGDRVTISCRASQDISKYLNWYQQKPDGTVKLLIYHTSRLHSGVPSRFSGSGSGTDYSLTISNLEQEDIATYFCQQGNTLPYTFGGGTKLEITKAGGGGSGGGGSGGGGSGGGGSEVKLQESGPGLVAPSQSLSVTCTVSGVSLPDYGVSWIRQPPRKGLEWLGVIWGSETTYYNSALKSRLTIIKDNSKSQVFLKMNSLQTDDTAIYYCAKHYYYGGSYAMDYWGQGTSVTVSSDPTTTPAPRPPTPAPTIASQPLSLRPEACRPAAGGAVHTRGLDFACDIFWVLVVVGGVLACYSLLVTVAFIIFWVRRVKFSRSADAPAYQQGQNQLYNELNLGRREEYDVLDKRRGRDPEMGGKPRRKNPQEGLYNELQKDKMAEAYSEIGMKGERRRGKGHDGLYQGLSTATKDTYDALHMQALPPRRAEGRGSLLTCGDVEENPGPMAVPTQVLGLLLLWLTDARCDIQMTQSPSSLSASVGDRVTITCRASEDIYFNLVWYQQKPGKAPKLLIYDTNRLADGVPSRFSGSGSGTQYTLTISSLQPEDFATYYCQHYKNYPLTFGQGTKLEIKRSGGGGSGGGGSGGGGSGGGGSRSEVQLVESGGGLVQPGGSLRLSCAASGFTLSNYGMHWIRQAPGKGLEWVSSISLNGGSTYYRDSVKGRFTISRDNAKSTLYLQMNSLRAEDTAVYYCAAQDAYTGGYFDYWGQGTLVTVSSMDPTTTKPVLRTPSPVHPTGTSQPQRPEDCRPRGSVKGTGLDFACDILIGVSVVFLFCLLLLVLFCLHRQNQIKQGPPRSKDEEQKPQQRPDLAVDVLERTADKATVNGLPEKDRETDTSALAAGSSQEVTYAQLDHWALTQRTARAVSPQSTKPMAESITYAAVARHRAEGRGSLLTCGDVEENPGPWYHGHMSGGQAETLLQAKGEPWTFLVRESLSQPGDFVLSVLSDQPKAGPGSPLRVTHIKVMCEGGRYTVGGLETFDSLTDLVEHFKKTGIEEASGAFVYLRQPYSGGGGSFEAYFKKQQADSNCGFAEEYEDLKLVGISQPKYAAELAENRGKNRYNNVLPYDISRVKLSVQTHSTDDYINANYMPGYHSKKDFIATQGPLPNTLKDFWRMVWEKNVYAIIMLTKCVEQGRTKCEEYWPSKQAQDYGDITVAMTSEIVLPEWTIRDFTVKNIQTSESHPLRQFHFTSWPDHGVPDTTDLLINFRYLVRDYMKQSPPESPILVHCSAGVGRTGTFIAIDRLIYQIENENTVDVYGIVYDLRMHRPLMVQTEDQYVFLNQCVLDIVRSQKDSKVDLIYQNTTAMTIYENLAPVTTFGKTNGYIASGS

SEQ ID NO: 1529 - protein, 1129 aa, Artificial Sequence [sequence omitted]

SEQ ID NO: 1530 - protein, 487 aa, Artificial Sequence
  source: /note="Description of Artificial Sequence: Synthetic Chimeric Antigen Receptor sequence"
MGTSLLCWMALCLLGADHADAQVQLQQSGPELVKPGASVKISCKASGYAFSSSWMNWVKQRPGKGLEWIGRIYPGDEDTNYSGKFKDKATLTADKSSTTAYMQLSSLTSEDSAVYFCARSLLYGDYLDYWGQGTTLTVSSGGGGSGGGGSGGGGSQIVLTQSPAIMSASPGEKVTMTCSASSSVSYMHWYQQKSGTSPKRWIYDTSKLASGVPDRFSGSGSGTSYFLTINNMEAEDAATYYCQQWNINPLTFGAGTKLELKRSDPTTTPAPRPPTPAPTIASQPLSLRPEACRPAAGGAVHTRGLDFACDIYIWAPLAGTCGVLLLSLVITLYCRSKRSRLLHSDYMNMTPRRPGPTRKHYQPYAPPRDFAAYRSRVKFSRSADAPAYQQGQNQLYNELNLGRREEYDVLDKRRGRDPEMGGKPRRKNPQEGLYNELQKDKMAEAYSEIGMKGERRRGKGHDGLYQGLSTATKDTYDALHMQALPPR

SEQ ID NO: 1531 - protein, 483 aa, Artificial Sequence
  source: /note="Description of Artificial Sequence: Synthetic Chimeric Antigen Receptor sequence"
MGTSLLCWMALCLLGADHADAQVQLQQSGPELVKPGASVKISCKASGYAFSSSWMNWVKQRPGKGLEWIGRIYPGDEDTNYSGKFKDKATLTADKSSTTAYMQLSSLTSEDSAVYFCARSLLYGDYLDYWGQGTTLTVSSGGGGSGGGGSGGGGSQIVLTQSPAIMSASPGEKVTMTCSASSSVSYMHWYQQKSGTSPKRWIYDTSKLASGVPDRFSGSGSGTSYFLTINNMEAEDAATYYCQQWNINPLTFGAGTKLELKRSDPTTTPAPRPPTPAPTIASQPLSLRPEACRPAAGGAVHTRGLDFACDIYIWAPLAGTCGVLLLSLVITLYCRRDQRLPPDAHKPPGGGSFRTPIQEEQADAHSTLAKIRVKFSRSADAPAYQQGQNQLYNELNLGRREEYDVLDKRRGRDPEMGGKPRRKNPQEGLYNELQKDKMAEAYSEIGMKGERRRGKGHDGLYQGLSTATKDTYDALHMQALPPR

SEQ ID NO: 1532 - protein, 488 aa, Artificial Sequence
  source: /note="Description of Artificial Sequence: Synthetic Chimeric Antigen Receptor sequence"
MGTSLLCWMALCLLGADHADAQVQLQQSGPELVKPGASVKISCKASGYAFSSSWMNWVKQRPGKGLEWIGRIYPGDEDTNYSGKFKDKATLTADKSSTTAYMQLSSLTSEDSAVYFCARSLLYGDYLDYWGQGTTLTVSSGGGGSGGGGSGGGGSQIVLTQSPAIMSASPGEKVTMTCSASSSVSYMHWYQQKSGTSPKRWIYDTSKLASGVPDRFSGSGSGTSYFLTINNMEAEDAATYYCQQWNINPLTFGAGTKLELKRSDPTTTPAPRPPTPAPTIASQPLSLRPEACRPAAGGAVHTRGLDFACDIYIWAPLAGTCGVLLLSLVITLYCKRGRKKLLYIFKQPFMRPVQTTQEEDGCSCRFPEEEEGGCELRVKFSRSADAPAYQQGQNQLYNELNLGRREEYDVLDKRRGRDPEMGGKPRRKNPQEGLYNELQKDKMAEAYSEIGMKGERRRGKGHDGLYQGLSTATKDTYDALHMQALPPR

SEQ ID NO: 1533 - protein, 527 aa, Artificial Sequence
  source: /note="Description of Artificial Sequence: Synthetic Chimeric Antigen Receptor sequence"
MGTSLLCWMALCLLGADHADAQVQLQQSGPELVKPGASVKISCKASGYAFSSSWMNWVKQRPGKGLEWIGRIYPGDEDTNYSGKFKDKATLTADKSSTTAYMQLSSLTSEDSAVYFCARSLLYGDYLDYWGQGTTLTVSSGGGGSGGGGSGGGGSQIVLTQSPAIMSASPGEKVTMTCSASSSVSYMHWYQQKSGTSPKRWIYDTSKLASGVPDRFSGSGSGTSYFLTINNMEAEDAATYYCQQWNINPLTFGAGTKLELKRSDPTTTPAPRPPTPAPTIASQPLSLRPEACRPAAGGAVHTRGLDFACDIFWVLVVVGGVLACYSLLVTVAFIIFWVRSKRSRLLHSDYMNMTPRRPGPTRKHYQPYAPPRDFAAYRSRDQRLPPDAHKPPGGGSFRTPIQEEQADAHSTLAKIRVKFSRSADAPAYQQGQNQLYNELNLGRREEYDVLDKRRGRDPEMGGKPRRKNPQEGLYNELQKDKMAEAYSEIGMKGERRRGKGHDGLYQGLSTATKDTYDALHMQALPPR

SEQ ID NO: 1534 - protein, 431 aa, Artificial Sequence
  source: /note="Description of Artificial Sequence: Synthetic Chimeric Antigen Receptor sequence"
QVQLQQPGAELVRPGASVKLSCKASGYTFTSYWMNWVKQRPDQGLEWIGRIDPYDSETHYNQKFKDKAILTVDKSSSTAYMQLSSLTSEDSAVYYCARGNWDDYWGQGTTLTVSSGGGGSGGGGSGGGGSDVQITQSPSYLAASPGETITINCRASKSISKDLAWYQEKPGKTNKLLIYSGSTLQSGIPSRFSGSGSGTDFTLTISSLEPEDFAMYYCQQHNKYPYTFGGGTKLEIKGLAVSTISSFFPPGYQIYIWAPLAGTCGVLLLSLVITLYCKRGRKKLLYIFKQPFMRPVQTTQEEDGCSCRFPEEEEGGCELRVKFSRSADAPAYQQGQNQLYNELNLGRREEYDVLDKRRGRDPEMGGKPRRKNPQEGLYNELQKDKMAEAYSEIGMKGERRRGKGHDGLYQGLSTATKDTYDALHMQALPPR

SEQ ID NO: 1535 - protein, 434 aa, Artificial Sequence
  source: /note="Description of Artificial Sequence: Synthetic Chimeric Antigen Receptor sequence"
QVQLQQPGAELVRPGASVKLSCKASGYTFTSYWMNWVKQRPDQGLEWIGRIDPYDSETHYNQKFKDKAILTVDKSSSTAYMQLSSLTSEDSAVYYCARGNWDDYWGQGTTLTVSSGGGGSGGGGSGGGGSDVQITQSPSYLAASPGETITINCRASKSISKDLAWYQEKPGKTNKLLIYSGSTLQSGIPSRFSGSGSGTDFTLTISSLEPEDFAMYYCQQHNKYPYTFGGGTKLEIKGLAVSTISSFFPPGYQIISFFLALTSTALLFLLFFLTLRFSVVKRGRKKLLYIFKQPFMRPVQTTQEEDGCSCRFPEEEEGGCELRVKFSRSADAPAYQQGQNQLYNELNLGRREEYDVLDKRRGRDPEMGGKPRRKNPQEGLYNELQKDKMAEAYSEIGMKGERRRGKGHDGLYQGLSTATKDTYDALHMQALPPR

SEQ ID NO: 1536 - protein, 438 aa, Artificial Sequence
  source: /note="Description of Artificial Sequence: Synthetic Chimeric Antigen Receptor sequence"
QIQLVQSGPELKKPGETVKISCKASGYIFTNYGMNWVKQAPGKSFKWMGWINTYTGESTYSADFKGRFAFSLETSASTAYLHINDLKNEDTATYFCARSGGYDPMDYWGQGTSVTVSSGGGGSGGGGSGGGGSDIVLTQSPASLAVSLGQRATISCRASESVDNYGNTFMHWYQQKPGQPPKLLIYRASNLESGIPARFSGSGSRTDFTLTINPVEADDVATYYCQQSNEDPPTFGAGTKLELKGLAVSTISSFFPPGYQIYIWAPLAGTCGVLLLSLVITLYCKRGRKKLLYIFKQPFMRPVQTTQEEDGCSCRFPEEEEGGCELRVKFSRSADAPAYQQGQNQLYNELNLGRREEYDVLDKRRGRDPEMGGKPRRKNPQEGLYNELQKDKMAEAYSEIGMKGERRRGKGHDGLYQGLSTATKDTYDALHMQALPPR

SEQ ID NO: 1537 - protein, 441 aa, Artificial Sequence
  source: /note="Description of Artificial Sequence: Synthetic Chimeric Antigen Receptor sequence"
QIQLVQSGPELKKPGETVKISCKASGYIFTNYGMNWVKQAPGKSFKWMGWINTYTGESTYSADFKGRFAFSLETSASTAYLHINDLKNEDTATYFCARSGGYDPMDYWGQGTSVTVSSGGGGSGGGGSGGGGSDIVLTQSPASLAVSLGQRATISCRASESVDNYGNTFMHWYQQKPGQPPKLLIYRASNLESGIPARFSGSGSRTDFTLTINPVEADDVATYYCQQSNEDPPTFGAGTKLELKGLAVSTISSFFPPGYQIISFFLALTSTALLFLLFFLTLRFSVVKRGRKKLLYIFKQPFMRPVQTTQEEDGCSCRFPEEEEGGCELRVKFSRSADAPAYQQGQNQLYNELNLGRREEYDVLDKRRGRDPEMGGKPRRKNPQEGLYNELQKDKMAEAYSEIGMKGERRRGKGHDGLYQGLSTATKDTYDALHMQALPPR

SEQ ID NO: 1538 - protein, 452 aa, Artificial Sequence
  source: /note="Description of Artificial Sequence: Synthetic Chimeric Antigen Receptor sequence"
EVKLVESGGGLVQPGGSLSLSCAASGFTFTDYYMSWVRQPPGKALEWLALIRSKADGYTTEYSASVKGRFTLSRDDSQSILYLQMNALRPEDSATYYCARDAAYYSYYSPEGAMDYWGQGTSVTVSSGGGGSGGGGSGGGGSMADYKDIVMTQSHKFMSTSVGDRVNITCKASQNVDSAVAWYQQKPGQSPKALIYSASYRYSGVPDRFTGRGSGTDFTLTISSVQAEDLAVYYCQQYYSTPWTFGGGTKLEIKRGLAVSTISSFFPPGYQIISFFLALTSTALLFLLFFLTLRFSVVKRGRKKLLYIFKQPFMRPVQTTQEEDGCSCRFPEEEEGGCELRVKFSRSADAPAYQQGQNQLYNELNLGRREEYDVLDKRRGRDPEMGGKPRRKNPQEGLYNELQKDKMAEAYSEIGMKGERRRGKGHDGLYQGLSTATKDTYDALHMQALPPR

SEQ ID NO: 1539 - protein, 460 aa, Artificial Sequence
  source: /note="Description of Artificial Sequence: Synthetic Chimeric Antigen Receptor sequence"
QVQLQQPGAELVRPGASVKLSCKASGYTFTSYWMNWVKQRPDQGLEWIGRIDPYDSETHYNQKFKDKAILTVDKSSSTAYMQLSSLTSEDSAVYYCARGNWDDYWGQGTTLTVSSGGGGSGGGGSGGGGSDVQITQSPSYLAASPGETITINCRASKSISKDLAWYQEKPGKTNKLLIYSGSTLQSGIPSRFSGSGSGTDFTLTISSLEPEDFAMYYCQQHNKYPYTFGGGTKLEIKTTTPAPRPPTPAPTIASQPLSLRPEACRPAAGGAVHTRGLDFACDIYIWAPLAGTCGVLLLSLVITLYCKRGRKKLLYIFKQPFMRPVQTTQEEDGCSCRFPEEEEGGCELRVKFSRSADAPAYQQGQNQLYNELNLGRREEYDVLDKRRGRDPEMGGKPRRKNPQEGLYNELQKDKMAEAYSEIGMKGERRRGKGHDGLYQGLSTATKDTYDALHMQALPPR

SEQ ID NO: 1540 - protein, 463 aa, Artificial Sequence
  source: /note="Description of Artificial Sequence: Synthetic Chimeric Antigen Receptor sequence"
QVQLQQPGAELVRPGASVKLSCKASGYTFTSYWMNWVKQRPDQGLEWIGRIDPYDSETHYNQKFKDKAILTVDKSSSTAYMQLSSLTSEDSAVYYCARGNWDDYWGQGTTLTVSSGGGGSGGGGSGGGGSDVQITQSPSYLAASPGETITINCRASKSISKDLAWYQEKPGKTNKLLIYSGSTLQSGIPSRFSGSGSGTDFTLTISSLEPEDFAMYYCQQHNKYPYTFGGGTKLEIKTTTPAPRPPTPAPTIASQPLSLRPEACRPAAGGAVHTRGLDFACDIISFFLALTSTALLFLLFFLTLRFSVVKRGRKKLLYIFKQPFMRPVQTTQEEDGCSCRFPEEEEGGCELRVKFSRSADAPAYQQGQNQLYNELNLGRREEYDVLDKRRGRDPEMGGKPRRKNPQEGLYNELQKDKMAEAYSEIGMKGERRRGKGHDGLYQGLSTATKDTYDALHMQALPPR

SEQ ID NO: 1541 - protein, 467 aa, Artificial Sequence
  source: /note="Description of Artificial Sequence: Synthetic Chimeric Antigen Receptor sequence"
QIQLVQSGPELKKPGETVKISCKASGYIFTNYGMNWVKQAPGKSFKWMGWINTYTGESTYSADFKGRFAFSLETSASTAYLHINDLKNEDTATYFCARSGGYDPMDYWGQGTSVTVSSGGGGSGGGGSGGGGSDIVLTQSPASLAVSLGQRATISCRASESVDNYGNTFMHWYQQKPGQPPKLLIYRASNLESGIPARFSGSGSRTDFTLTINPVEADDVATYYCQQSNEDPPTFGAGTKLELKTTTPAPRPPTPAPTIASQPLSLRPEACRPAAGGAVHTRGLDFACDIYIWAPLAGTCGVLLLSLVITLYCKRGRKKLLYIFKQPFMRPVQTTQEEDGCSCRFPEEEEGGCELRVKFSRSADAPAYQQGQNQLYNELNLGRREEYDVLDKRRGRDPEMGGKPRRKNPQEGLYNELQKDKMAEAYSEIGMKGERRRGKGHDGLYQGLSTATKDTYDALHMQALPPR

SEQ ID NO: 1542 - protein, 470 aa, Artificial Sequence
  source: /note="Description of Artificial Sequence: Synthetic Chimeric Antigen Receptor sequence"
EVQLVESGGGLVQPGRSLRLSCTASGFTFTDYYMSVRQAPGKGLEWVGLIRSKADGYTTEYAASVKGRFTISRDDSQSIAYLQMNSLKTEDTAVYYCARDAAYYSYYSPEGAMDYGQGTLVTVSSGGGGSGGGGSGGGGSDIQMTQSPSSVSASVGDRVTITCKASQNVDSAVAYQQKPGKAPKALIYSASYRYSGVPDRFSGSGSGTDFTLTISSLQPEDLATYYCQQYYSTPWTFGQGTKVEIKRTTTPAPRPPTPAPTIASQPLSLRPEACRPAAGGAVHTRGLDFACDIYIWAPLAGTCGVLLLSLVITLYCKRGRKKLLYIFKQPFMRPVQTTQEEDGCSCRFPEEEEGGCELRVKFSRSADAPAYQQGQNQLYNELNLGRREEYDVLDKRRGRDPEMGGKPRRKNPQEGLYNELQKDKMAEAYSEIGMKGERRRGKGHDGLYQGLSTATKDTYDALHMQALPPR

SEQ ID NO: 1543 - protein, 470 aa, Artificial Sequence
  source: /note="Description of Artificial Sequence: Synthetic Chimeric Antigen Receptor sequence"
EVQLVESGGGLVQPGRSLRLSCTASGFTFTDYYMSVRQAPGKGLEWVGLIRSKADGYTTEYSASVKGRFTISRDDSKSILYLQMNSLKTEDTAVYYCARDAAYYSYYSPEGAMDYGQGTLVTVSSGGGGSGGGGSGGGGSDIQMTQSPSSVSASVGDRVTITCRASQNVDSAVAYQQKPGKAPKALIYSASYRYSGVPSRFSGSGSGTDFTLTISSLQPEDFATYYCQQYYSTPWTFGQGTKVEIKRTTTPAPRPPTPAPTIASQPLSLRPEACRPAAGGAVHTRGLDFACDIYIWAPLAGTCGVLLLSLVITLYCKRGRKKLLYIFKQPFMRPVQTTQEEDGCSCRFPEEEEGGCELRVKFSRSADAPAYQQGQNQLYNELNLGRREEYDVLDKRRGRDPEMGGKPRRKNPQEGLYNELQKDKMAEAYSEIGMKGERRRGKGHDGLYQGLSTATKDTYDALHMQALPPR

SEQ ID NO: 1544 - protein, 470 aa, Artificial Sequence
  source: /note="Description of Artificial Sequence: Synthetic Chimeric Antigen Receptor sequence"
EVQLVESGGGLVQPGRSLRLSCTASGFTFTDYYMSWVRQAPGKGLEWVGLIRSKADGYTTEYSASVKGRFTISRDDSQSIAYLQMNSLKTEDTAVYYCARDAAYYSYYSPEGAMDYGQGTLVTVSSGGGGSGGGGSGGGGSDIQMTQSPSSVSASVGDRVTITCRASQVDSAVAWYQQKPGKAPKALIYSASYRYSGVPSRFSGSGSGTDFTLTISSLQPEDLATYYCQQYYSTPTFGQGTKVEIKRTTTPAPRPPTPAPTIASQPLSLRPEACRPAAGGAVHTRGLDFACDIYIWAPLAGTCGVLLLSLVITLYCKRGRKKLLYIFKQPFMRPVQTTQEEDGCSCRFPEEEEGGCELRVKFSRSADAPAYQQGQNQLYNELNLGRREEYDVLDKRRGRDPEMGGKPRRKNPQEGLYNELQKDKMAEAYSEIGMKGERRRGKGHDGLYQGLSTATKDTYDALHMQALPPR

SEQ ID NO: 1545 - protein, 470 aa, Artificial Sequence
  source: /note="Description of Artificial Sequence: Synthetic Chimeric Antigen Receptor sequence"
MALPVTALLLPLALLLHAARPEVKLVESGGGLVQPGGSLSLSCAASGFTFTDYYMSWVRQPPGKALEWLALIRSKADGYTTEYSASVKGRFTLSRDDSQSILYLQMNALRPEDSATYYCARDAAYYSYYSPEGAMDYWGQGTSVTVSSGGGGSGGGGSGGGGSMADYKDIVMTQSHKFMSTSVGDRVNITCKASQNVDSAVAWYQQKPGQSPKALIYSASYRYSGVPDRFTGRGSGTDFTLTISSVQAEDLAVYYCQQYYSTPWTFGGGTKLEIKRGLAVSTISSFFPPGYQIYIWAPLAGTCGVLLLSLVITLYCKRGRKKLLYIFKQPFMRPVQTTQEEDGCSCRFPEEEEGGCELRVKFSRSADAPAYQQGQNQLYNELNLGRREEYDVLDKRRGRDPEMGGKPRRKNPQEGLYNELQKDKMAEAYSEIGMKGERRRGKGHDGLYQGLSTATKDTYDALHMQALPPR

SEQ ID NO: 1546 - protein, 470 aa, Artificial Sequence
  source: /note="Description of Artificial Sequence: Synthetic Chimeric Antigen Receptor sequence"
MALPVTALLLPLALLLHAARPEVKLVESGGGLVQPGRSLRLSCTASGFTFTDYYMSWVRQAPGKGLEWVGLIRSKADGYTTEYSASVKGRFTISRDDSKSILYLQMNSLKTEDTAVYYCARDAAYYSYYSPEGAMDYWGQGTLVTVSSGGGGSGGGGSGGGGSMADYKDIQMTQSPSSVSASVGDRVTITCRASQNVDSAVAWYQQKPGKAPKALIYSASYRYSGVPSRFSGRGSGTDFTLTISSLQPEDFATYYCQQYYSTPWTFGQGTKVEIKRGLAVSTISSFFPPGYQIYIWAPLAGTCGVLLLSLVITLYCKRGRKKLLYIFKQPFMRPVQTTQEEDGCSCRFPEEEEGGCELRVKFSRSADAPAYQQGQNQLYNELNLGRREEYDVLDKRRGRDPEMGGKPRRKNPQEGLYNELQKDKMAEAYSEIGMKGERRRGKGHDGLYQGLSTATKDTYDALHMQALPPR

SEQ ID NO: 1547 - protein, 470 aa, Artificial Sequence
  source: /note="Description of Artificial Sequence: Synthetic Chimeric Antigen Receptor sequence"
MALPVTALLLPLALLLHAARPEVKLVESGGGLVQPGRSLRLSCTASGFTFTDYYMSWVRQAPGKGLEWVGLIRSKADGYTTEYSASVKGRFTISRDDSKSILYLQMNSLKTEDTAVYYCARDAAYYSYYSPEGAMDYWGQGTLVTVSSGGGGSGGGGSGGGGSMADYKDIQMTQSPSSVSASVGDRVTITCRASQNVDSAVAWYQQKPGKAPKALIYSASYRYSGVPSRFSGSGSGTDFTLTISSLQPEDFATYYCQQYYSTPWTFGQGTKVEIKRGLAVSTISSFFPPGYQIYIWAPLAGTCGVLLLSLVITLYCKRGRKKLLYIFKQPFMRPVQTTQEEDGCSCRFPEEEEGGCELRVKFSRSADAPAYQQGQNQLYNELNLGRREEYDVLDKRRGRDPEMGGKPRRKNPQEGLYNELQKDKMAEAYSEIGMKGERRRGKGHDGLYQGLSTATKDTYDALHMQALPPR

SEQ ID NO: 1548 - protein, 470 aa, Artificial Sequence
  source: /note="Description of Artificial Sequence: Synthetic Chimeric Antigen Receptor sequence"
MALPVTALLLPLALLLHAARPEVKLVESGGGLVQPGRSLRLSCTASGFTFTDYYMSWVRQAPGKGLEWVGLIRSKADGYTTEYSASVKGRFTISRDDSKSILYLQMNSLKTEDTAVYYCARDAAYYSYYSPEGAMDYWGQGTLVTVSSGGGGSGGGGSGGGGSMADYKDIQMTQSPSSVSASVGDRVTITCRASQNVDSAVAWYQQKPGKAPKLLIYSASYGQSGVPSRFSGSGSGTDFTLTISSLQPEDFATYYCQQYYSTPWTFGQGTKVEIKRGLAVSTISSFFPPGYQIYIWAPLAGTCGVLLLSLVITLYCKRGRKKLLYIFKQPFMRPVQTTQEEDGCSCRFPEEEEGGCELRVKFSRSADAPAYQQGQNQLYNELNLGRREEYDVLDKRRGRDPEMGGKPRRKNPQEGLYNELQKDKMAEAYSEIGMKGERRRGKGHDGLYQGLSTATKDTYDALHMQALPPR

SEQ ID NO: 1549 - protein, 470 aa, Artificial Sequence
  source: /note="Description of Artificial Sequence: Synthetic Chimeric Antigen Receptor sequence"
MALPVTALLLPLALLLHAARPEVKLVESGGGLVQPGRSLRLSCTASGFTFTDYYMSWVRQAPGKGLEWVGLIRSKADGYTTEYSASVKGRFTISRDDSKSILYLQMNSLKTEDTAVYYCARDAAYYSYYSPEGAMDYWGQGTLVTVSSGGGGSGGGGSGGGGSMADYKDIQMTQSPSSVSASVGDRVTITCRASQNVDSAVAWYQQKPGKAPKLLIYSASYRQSGVPSRFSGSGSGTDFTLTISSLQPEDFATYYCQQYYSTPWTFGQGTKVEIKRGLAVSTISSFFPPGYQIYIWAPLAGTCGVLLLSLVITLYCKRGRKKLLYIFKQPFMRPVQTTQEEDGCSCRFPEEEEGGCELRVKFSRSADAPAYQQGQNQLYNELNLGRREEYDVLDKRRGRDPEMGGKPRRKNPQEGLYNELQKDKMAEAYSEIGMKGERRRGKGHDGLYQGLSTATKDTYDALHMQALPPR

SEQ ID NO: 1550 - protein, 470 aa, Artificial Sequence
  source: /note="Description of Artificial Sequence: Synthetic Chimeric Antigen Receptor sequence"
MALPVTALLLPLALLLHAARPEVKLVESGGGLVQPGRSLRLSCTASGFTFTDYYMSWVRQAPGKGLEWVGLIRSKADGYTTEYSASVKGRFTISRDDSKSILYLQMNSLKTEDTAVYYCARDAAYYSYYSPEGAMDYWGQGTLVTVSSGGGGSGGGGSGGGGSMADYKDIQMTQSPSSVSASVGDRVTITCRASQNVDSAVAWYQQKPGKAPKLLIYSASYRYSGVPSRFSGSGSGTDFTLTISSLQPEDFATYYCQQYYSTPWTFGQGTKVEIKRGLAVSTISSFFPPGYQIYIWAPLAGTCGVLLLSLVITLYCKRGRKKLLYIFKQPFMRPVQTTQEEDGCSCRFPEEEEGGCELRVKFSRSADAPAYQQGQNQLYNELNLGRREEYDVLDKRRGRDPEMGGKPRRKNPQEGLYNELQKDKMAEAYSEIGMKGERRRGKGHDGLYQGLSTATKDTYDALHMQALPPR

SEQ ID NO: 1551 - protein, 470 aa, Artificial Sequence
  source: /note="Description of Artificial Sequence: Synthetic Chimeric Antigen Receptor sequence"
MALPVTALLLPLALLLHAARPEVKLVESGGGLVQPGRSLRLSCTASGFTFTDYYMSWVRQAPGKGLEWVGLIRSKADGYTTEYSASVKGRFTISRDDSKSILYLQMNSLKTEDTAVYYCARDAAYYSYYSPEGAMDYWGQGTLVTVSSGGGGSGGGGSGGGGSMADYKDIVMTQSPSSVSASVGDRVTITCRASQNVDSAVAWYQQKPGKAPKALIYSASYRYSGVPSRFSGRGSGTDFTLTISSLQPEDFATYYCQQYYSTPWTFGQGTKVEIKRGLAVSTISSFFPPGYQIYIWAPLAGTCGVLLLSLVITLYCKRGRKKLLYIFKQPFMRPVQTTQEEDGCSCRFPEEEEGGCELRVKFSRSADAPAYQQGQNQLYNELNLGRREEYDVLDKRRGRDPEMGGKPRRKNPQEGLYNELQKDKMAEAYSEIGMKGERRRGKGHDGLYQGLSTATKDTYDALHMQALPPR

SEQ ID NO: 1552 - protein, 470 aa, Artificial Sequence
  source: /note="Description of Artificial Sequence: Synthetic Chimeric Antigen Receptor sequence"
MALPVTALLLPLALLLHAARPEVQLVESGGGLVQPGRSLRLSCTASGFTFTDYYMSWVRQAPGKGLEWVGFIRSKADGYTTEYAASVKGRFTISRDDSKSIAYLQMNSLKTEDTAVYYCARDAAYYSYYSPEGAMDYWGQGTLVTVSSGGGGSGGGGSGGGGSMADYKDIQMTQSPSSVSASVGDRVTITCRASQNVDSAVAWYQQKPGKAPKALIYSASYRYSGVPSRFSGRGSGTDFTLTISSLQPEDFATYYCQQYYSTPWTFGQGTKVEIKRGLAVSTISSFFPPGYQIYIWAPLAGTCGVLLLSLVITLYCKRGRKKLLYIFKQPFMRPVQTTQEEDGCSCRFPEEEEGGCELRVKFSRSADAPAYQQGQNQLYNELNLGRREEYDVLDKRRGRDPEMGGKPRRKNPQEGLYNELQKDKMAEAYSEIGMKGERRRGKGHDGLYQGLSTATKDTYDALHMQALPPR

SEQ ID NO: 1553 - protein, 470 aa, Artificial Sequence
  source: /note="Description of Artificial Sequence: Synthetic Chimeric Antigen Receptor sequence"
MALPVTALLLPLALLLHAARPEVQLVESGGGLVQPGRSLRLSCTASGFTFTDYYMSWVRQAPGKGLEWVGFIRSKADGYTTEYAASVKGRFTISRDDSKSIAYLQMNSLKTEDTAVYYCARDAAYYSYYSPEGAMDYWGQGTLVTVSSGGGGSGGGGSGGGGSMADYKDIQMTQSPSSVSASVGDRVTITCRASQNVDSAVAWYQQKPGKAPKALIYSASYRYSGVPSRFSGSGSGTDFTLTISSLQPEDFATYYCQQYYSTPWTFGQGTKVEIKRGLAVSTISSFFPPGYQIYIWAPLAGTCGVLLLSLVITLYCKRGRKKLLYIFKQPFMRPVQTTQEEDGCSCRFPEEEEGGCELRVKFSRSADAPAYQQGQNQLYNELNLGRREEYDVLDKRRGRDPEMGGKPRRKNPQEGLYNELQKDKMAEAYSEIGMKGERRRGKGHDGLYQGLSTATKDTYDALHMQALPPR

SEQ ID NO: 1554 - protein, 470 aa, Artificial Sequence
  source: /note="Description of Artificial Sequence: Synthetic Chimeric Antigen Receptor sequence"
MALPVTALLLPLALLLHAARPEVQLVESGGGLVQPGRSLRLSCTASGFTFTDYYMSWVRQAPGKGLEWVGFIRSKADGYTTEYAASVKGRFTISRDDSKSIAYLQMNSLKTEDTAVYYCARDAAYYSYYSPEGAMDYWGQGTLVTVSSGGGGSGGGGSGGGGSMADYKDIQMTQSPSSVSASVGDRVTITCRASQNVDSAVAWYQQKPGKAPKLLIYSASYGQSGVPSRFSGSGSGTDFTLTISSLQPEDFATYYCQQYYSTPWTFGQGTKVEIKRGLAVSTISSFFPPGYQIYIWAPLAGTCGVLLLSLVITLYCKRGRKKLLYIFKQPFMRPVQTTQEEDGCSCRFPEEEEGGCELRVKFSRSADAPAYQQGQNQLYNELNLGRREEYDVLDKRRGRDPEMGGKPRRKNPQEGLYNELQKDKMAEAYSEIGMKGERRRGKGHDGLYQGLSTATKDTYDALHMQALPPR

SEQ ID NO: 1555 - protein, 470 aa, Artificial Sequence
  source: /note="Description of Artificial Sequence: Synthetic Chimeric Antigen Receptor sequence"
MALPVTALLLPLALLLHAARPEVQLVESGGGLVQPGRSLRLSCTASGFTFTDYYMSWVRQAPGKGLEWVGFIRSKADGYTTEYAASVKGRFTISRDDSKSIAYLQMNSLKTEDTAVYYCARDAAYYSYYSPEGAMDYWGQGTLVTVSSGGGGSGGGGSGGGGSMADYKDIQMTQSPSSVSASVGDRVTITCRASQNVDSAVAWYQQKPGKAPKLLIYSASYRQSGVPSRFSGSGSGTDFTLTISSLQPEDFATYYCQQYYSTPWTFGQGTKVEIKRGLAVSTISSFFPPGYQIYIWAPLAGTCGVLLLSLVITLYCKRGRKKLLYIFKQPFMRPVQTTQEEDGCSCRFPEEEEGGCELRVKFSRSADAPAYQQGQNQLYNELNLGRREEYDVLDKRRGRDPEMGGKPRRKNPQEGLYNELQKDKMAEAYSEIGMKGERRRGKGHDGLYQGLSTATKDTYDALHMQALPPR

SEQ ID NO: 1556 - protein, 470 aa, Artificial Sequence
  source: /note="Description of Artificial Sequence: Synthetic Chimeric Antigen Receptor sequence"
MALPVTALLLPLALLLHAARPEVQLVESGGGLVQPGRSLRLSCTASGFTFTDYYMSWVRQAPGKGLEWVGFIRSKADGYTTEYAASVKGRFTISRDDSKSIAYLQMNSLKTEDTAVYYCARDAAYYSYYSPEGAMDYWGQGTLVTVSSGGGGSGGGGSGGGGSMADYKDIQMTQSPSSVSASVGDRVTITCRASQNVDSAVAWYQQKPGKAPKLLIYSASYRYSGVPSRFSGSGSGTDFTLTISSLQPEDFATYYCQQYYSTPWTFGQGTKVEIKRGLAVSTISSFFPPGYQIYIWAPLAGTCGVLLLSLVITLYCKRGRKKLLYIFKQPFMRPVQTTQEEDGCSCRFPEEEEGGCELRVKFSRSADAPAYQQGQNQLYNELNLGRREEYDVLDKRRGRDPEMGGKPRRKNPQEGLYNELQKDKMAEAYSEIGMKGERRRGKGHDGLYQGLSTATKDTYDALHMQALPPR

SEQ ID NO: 1557 - protein, 470 aa, Artificial Sequence
  source: /note="Description of Artificial Sequence: Synthetic Chimeric Antigen Receptor sequence"
MALPVTALLLPLALLLHAARPEVQLVESGGGLVQPGRSLRLSCTASGFTFTDYYMSWVRQAPGKGLEWVGFIRSKADGYTTEYAASVKGRFTISRDDSKSIAYLQMNSLKTEDTAVYYCARDAAYYSYYSPEGAMDYWGQGTLVTVSSGGGGSGGGGSGGGGSMADYKDIVMTQSPSSVSASVGDRVTITCRASQNVDSAVAWYQQKPGKAPKALIYSASYRYSGVPSRFSGRGSGTDFTLTISSLQPEDFATYYCQQYYSTPWTFGQGTKVEIKRGLAVSTISSFFPPGYQIYIWAPLAGTCGVLLLSLVITLYCKRGRKKLLYIFKQPFMRPVQTTQEEDGCSCRFPEEEEGGCELRVKFSRSADAPAYQQGQNQLYNELNLGRREEYDVLDKRRGRDPEMGGKPRRKNPQEGLYNELQKDKMAEAYSEIGMKGERRRGKGHDGLYQGLSTATKDTYDALHMQALPPR

SEQ ID NO: 1558 - protein, 470 aa, Artificial Sequence
  source: /note="Description of Artificial Sequence: Synthetic Chimeric Antigen Receptor sequence"
MALPVTALLLPLALLLHAARPEVQLVESGGGLVQPGRSLRLSCTASGFTFTDYYMSWVRQAPGKGLEWVGFIRSKADGYTTEYAASVKGRFTISRDDSKSIAYLQMNSLKTEDTAVYYCTRDAAYYSYYSPEGAMDYWGQGTLVTVSSGGGGSGGGGSGGGGSMADYKDIQMTQSPSSVSASVGDRVTITCRASQNVDSAVAWYQQKPGKAPKALIYSASYRYSGVPSRFSGRGSGTDFTLTISSLQPEDFATYYCQQYYSTPWTFGQGTKVEIKRGLAVSTISSFFPPGYQIYIWAPLAGTCGVLLLSLVITLYCKRGRKKLLYIFKQPFMRPVQTTQEEDGCSCRFPEEEEGGCELRVKFSRSADAPAYQQGQNQLYNELNLGRREEYDVLDKRRGRDPEMGGKPRRKNPQEGLYNELQKDKMAEAYSEIGMKGERRRGKGHDGLYQGLSTATKDTYDALHMQALPPR

SEQ ID NO: 1559 - protein, 470 aa, Artificial Sequence
  source: /note="Description of Artificial Sequence: Synthetic Chimeric Antigen Receptor sequence"
MALPVTALLLPLALLLHAARPEVQLVESGGGLVQPGRSLRLSCTASGFTFTDYYMSWVRQAPGKGLEWVGFIRSKADGYTTEYAASVKGRFTISRDDSKSIAYLQMNSLKTEDTAVYYCTRDAAYYSYYSPEGAMDYWGQGTLVTVSSGGGGSGGGGSGGGGSMADYKDIQMTQSPSSVSASVGDRVTITCRASQNVDSAVAWYQQKPGKAPKALIYSASYRYSGVPSRFSGSGSGTDFTLTISSLQPEDFATYYCQQYYSTPWTFGQGTKVEIKRGLAVSTISSFFPPGYQIYIWAPLAGTCGVLLLSLVITLYCKRGRKKLLYIFKQPFMRPVQTTQEEDGCSCRFPEEEEGGCELRVKFSRSADAPAYQQGQNQLYNELNLGRREEYDVLDKRRGRDPEMGGKPRRKNPQEGLYNELQKDKMAEAYSEIGMKGERRRGKGHDGLYQGLSTATKDTYDALHMQALPPR

SEQ ID NO: 1560 - protein, 470 aa, Artificial Sequence
  source: /note="Description of Artificial Sequence: Synthetic Chimeric Antigen Receptor sequence"
MALPVTALLLPLALLLHAARPEVQLVESGGGLVQPGRSLRLSCTASGFTFTDYYMSWVRQAPGKGLEWVGFIRSKADGYTTEYAASVKGRFTISRDDSKSIAYLQMNSLKTEDTAVYYCTRDAAYYSYYSPEGAMDYWGQGTLVTVSSGGGGSGGGGSGGGGSMADYKDIQMTQSPSSVSASVGDRVTITCRASQNVDSAVAWYQQKPGKAPKLLIYSASYGQSGVPSRFSGSGSGTDFTLTISSLQPEDFATYYCQQYYSTPWTFGQGTKVEIKRGLAVSTISSFFPPGYQIYIWAPLAGTCGVLLLSLVITLYCKRGRKKLLYIFKQPFMRPVQTTQEEDGCSCRFPEEEEGGCELRVKFSRSADAPAYQQGQNQLYNELNLGRREEYDVLDKRRGRDPEMGGKPRRKNPQEGLYNELQKDKMAEAYSEIGMKGERRRGKGHDGLYQGLSTATKDTYDALHMQALPPR

SEQ ID NO: 1561 - protein, 470 aa, Artificial Sequence
  source: /note="Description of Artificial Sequence: Synthetic Chimeric Antigen Receptor sequence"
MALPVTALLLPLALLLHAARPEVQLVESGGGLVQPGRSLRLSCTASGFTFTDYYMSWVRQAPGKGLEWVGFIRSKADGYTTEYAASVKGRFTISRDDSKSIAYLQMNSLKTEDTAVYYCTRDAAYYSYYSPEGAMDYWGQGTLVTVSSGGGGSGGGGSGGGGSMADYKDIQMTQSPSSVSASVGDRVTITCRASQNVDSAVAWYQQKPGKAPKLLIYSASYRQSGVPSRFSGSGSGTDFTLTISSLQPEDFATYYCQQYYSTPWTFGQGTKVEIKRGLAVSTISSFFPPGYQIYIWAPLAGTCGVLLLSLVITLYCKRGRKKLLYIFKQPFMRPVQTTQEEDGCSCRFPEEEEGGCELRVKFSRSADAPAYQQGQNQLYNELNLGRREEYDVLDKRRGRDPEMGGKPRRKNPQEGLYNELQKDKMAEAYSEIGMKGERRRGKGHDGLYQGLSTATKDTYDALHMQALPPR

SEQ ID NO: 1562 - protein, 470 aa, Artificial Sequence
  source: /note="Description of Artificial Sequence: Synthetic Chimeric Antigen Receptor sequence"
MALPVTALLLPLALLLHAARPEVQLVESGGGLVQPGRSLRLSCTASGFTFTDYYMSWVRQAPGKGLEWVGFIRSKADGYTTEYAASVKGRFTISRDDSKSIAYLQMNSLKTEDTAVYYCTRDAAYYSYYSPEGAMDYWGQGTLVTVSSGGGGSGGGGSGGGGSMADYKDIQMTQSPSSVSASVGDRVTITCRASQNVDSAVAWYQQKPGKAPKLLIYSASYRYSGVPSRFSGSGSGTDFTLTISSLQPEDFATYYCQQYYSTPWTFGQGTKVEIKRGLAVSTISSFFPPGYQIYIWAPLAGTCGVLLLSLVITLYCKRGRKKLLYIFKQPFMRPVQTTQEEDGCSCRFPEEEEGGCELRVKFSRSADAPAYQQGQNQLYNELNLGRREEYDVLDKRRGRDPEMGGKPRRKNPQEGLYNELQKDKMAEAYSEIGMKGERRRGKGHDGLYQGLSTATKDTYDALHMQALPPR

SEQ ID NO: 1563 - protein, 470 aa, Artificial Sequence
  source: /note="Description of Artificial Sequence: Synthetic Chimeric Antigen Receptor sequence"
MALPVTALLLPLALLLHAARPEVQLVESGGGLVQPGRSLRLSCTASGFTFTDYYMSWVRQAPGKGLEWVGFIRSKADGYTTEYAASVKGRFTISRDDSKSIAYLQMNSLKTEDTAVYYCTRDAAYYSYYSPEGAMDYWGQGTLVTVSSGGGGSGGGGSGGGGSMADYKDIVMTQSPSSVSASVGDRVTITCRASQNVDSAVAWYQQKPGKAPKALIYSASYRYSGVPSRFSGRGSGTDFTLTISSLQPEDFATYYCQQYYSTPWTFGQGTKVEIKRGLAVSTISSFFPPGYQIYIWAPLAGTCGVLLLSLVITLYCKRGRKKLLYIFKQPFMRPVQTTQEEDGCSCRFPEEEEGGCELRVKFSRSADAPAYQQGQNQLYNELNLGRREEYDVLDKRRGRDPEMGGKPRRKNPQEGLYNELQKDKMAEAYSEIGMKGERRRGKGHDGLYQGLSTATKDTYDALHMQALPPR

SEQ ID NO: 1564 - protein, 470 aa, Artificial Sequence
  source: /note="Description of Artificial Sequence: Synthetic Chimeric Antigen Receptor sequence"
MALPVTALLLPLALLLHAARPEVQLVESGGGLVQPGRSLRLSCTASGFTFTDYYMSWVRQAPGKGLEWVGFIRSKADGYTTEYSASVKGRFTISRDDSKSIAYLQMNSLKTEDTAVYYCARDAAYYSYYSPEGAMDYWGQGTLVTVSSGGGGSGGGGSGGGGSMADYKDIQMTQSPSSVSASVGDRVTITCRASQNVDSAVAWYQQKPGKAPKALIYSASYRYSGVPSRFSGRGSGTDFTLTISSLQPEDFATYYCQQYYSTPWTFGQGTKVEIKRGLAVSTISSFFPPGYQIYIWAPLAGTCGVLLLSLVITLYCKRGRKKLLYIFKQPFMRPVQTTQEEDGCSCRFPEEEEGGCELRVKFSRSADAPAYQQGQNQLYNELNLGRREEYDVLDKRRGRDPEMGGKPRRKNPQEGLYNELQKDKMAEAYSEIGMKGERRRGKGHDGLYQGLSTATKDTYDALHMQALPPR

SEQ ID NO: 1565 - protein, 470 aa, Artificial Sequence
  source: /note="Description of Artificial Sequence: Synthetic Chimeric Antigen Receptor sequence"
MALPVTALLLPLALLLHAARPEVQLVESGGGLVQPGRSLRLSCTASGFTFTDYYMSWVRQAPGKGLEWVGFIRSKADGYTTEYSASVKGRFTISRDDSKSIAYLQMNSLKTEDTAVYYCARDAAYYSYYSPEGAMDYWGQGTLVTVSSGGGGSGGGGSGGGGSMADYKDIQMTQSPSSVSASVGDRVTITCRASQNVDSAVAWYQQKPGKAPKALIYSASYRYSGVPSRFSGSGSGTDFTLTISSLQPEDFATYYCQQYYSTPWTFGQGTKVEIKRGLAVSTISSFFPPGYQIYIWAPLAGTCGVLLLSLVITLYCKRGRKKLLYIFKQPFMRPVQTTQEEDGCSCRFPEEEEGGCELRVKFSRSADAPAYQQGQNQLYNELNLGRREEYDVLDKRRGRDPEMGGKPRRKNPQEGLYNELQKDKMAEAYSEIGMKGERRRGKGHDGLYQGLSTATKDTYDALHMQALPPR

SEQ ID NO: 1566 - protein, 470 aa, Artificial Sequence
  source: /note="Description of Artificial Sequence: Synthetic Chimeric Antigen Receptor sequence"
MALPVTALLLPLALLLHAARPEVQLVESGGGLVQPGRSLRLSCTASGFTFTDYYMSWVRQAPGKGLEWVGFIRSKADGYTTEYSASVKGRFTISRDDSKSIAYLQMNSLKTEDTAVYYCARDAAYYSYYSPEGAMDYWGQGTLVTVSSGGGGSGGGGSGGGGSMADYKDIQMTQSPSSVSASVGDRVTITCRASQNVDSAVAWYQQKPGKAPKLLIYSASYGQSGVPSRFSGSGSGTDFTLTISSLQPEDFATYYCQQYYSTPWTFGQGTKVEIKRGLAVSTISSFFPPGYQIYIWAPLAGTCGVLLLSLVITLYCKRGRKKLLYIFKQPFMRPVQTTQEEDGCSCRFPEEEEGGCELRVKFSRSADAPAYQQGQNQLYNELNLGRREEYDVLDKRRGRDPEMGGKPRRKNPQEGLYNELQKDKMAEAYSEIGMKGERRRGKGHDGLYQGLSTATKDTYDALHMQALPPR

SEQ ID NO: 1567 - protein, 470 aa, Artificial Sequence
  source: /note="Description of Artificial Sequence: Synthetic Chimeric Antigen Receptor sequence"
MALPVTALLLPLALLLHAARPEVQLVESGGGLVQPGRSLRLSCTASGFTFTDYYMSWVRQAPGKGLEWVGFIRSKADGYTTEYSASVKGRFTISRDDSKSIAYLQMNSLKTEDTAVYYCARDAAYYSYYSPEGAMDYWGQGTLVTVSSGGGGSGGGGSGGGGSMADYKDIQMTQSPSSVSASVGDRVTITCRASQNVDSAVAWYQQKPGKAPKLLIYSASYRQSGVPSRFSGSGSGTDFTLTISSLQPEDFATYYCQQYYSTPWTFGQGTKVEIKRGLAVSTISSFFPPGYQIYIWAPLAGTCGVLLLSLVITLYCKRGRKKLLYIFKQPFMRPVQTTQEEDGCSCRFPEEEEGGCELRVKFSRSADAPAYQQGQNQLYNELNLGRREEYDVLDKRRGRDPEMGGKPRRKNPQEGLYNELQKDKMAEAYSEIGMKGERRRGKGHDGLYQGLSTATKDTYDALHMQALPPR

SEQ ID NO: 1568 - protein, 470 aa, Artificial Sequence
  source: /note="Description of Artificial Sequence: Synthetic Chimeric Antigen Receptor sequence"
MALPVTALLLPLALLLHAARPEVQLVESGGGLVQPGRSLRLSCTASGFTFTDYYMSWVRQAPGKGLEWVGFIRSKADGYTTEYSASVKGRFTISRDDSKSIAYLQMNSLKTEDTAVYYCARDAAYYSYYSPEGAMDYWGQGTLVTVSSGGGGSGGGGSGGGGSMADYKDIQMTQSPSSVSASVGDRVTITCRASQNVDSAVAWYQQKPGKAPKLLIYSASYRYSGVPSRFSGSGSGTDFTLTISSLQPEDFATYYCQQYYSTPWTFGQGTKVEIKRGLAVSTISSFFPPGYQIYIWAPLAGTCGVLLLSLVITLYCKRGRKKLLYIFKQPFMRPVQTTQEEDGCSCRFPEEEEGGCELRVKFSRSADAPAYQQGQNQLYNELNLGRREEYDVLDKRRGRDPEMGGKPRRKNPQEGLYNELQKDKMAEAYSEIGMKGERRRGKGHDGLYQGLSTATKDTYDALHMQALPPR

SEQ ID NO: 1569 - protein, 470 aa, Artificial Sequence
  source: /note="Description of Artificial Sequence: Synthetic Chimeric Antigen Receptor sequence"
MALPVTALLLPLALLLHAARPEVQLVESGGGLVQPGRSLRLSCTASGFTFTDYYMSWVRQAPGKGLEWVGFIRSKADGYTTEYSASVKGRFTISRDDSKSIAYLQMNSLKTEDTAVYYCARDAAYYSYYSPEGAMDYWGQGTLVTVSSGGGGSGGGGSGGGGSMADYKDIVMTQSPSSVSASVGDRVTITCRASQNVDSAVAWYQQKPGKAPKALIYSASYRYSGVPSRFSGRGSGTDFTLTISSLQPEDFATYYCQQYYSTPWTFGQGTKVEIKRGLAVSTISSFFPPGYQIYIWAPLAGTCGVLLLSLVITLYCKRGRKKLLYIFKQPFMRPVQTTQEEDGCSCRFPEEEEGGCELRVKFSRSADAPAYQQGQNQLYNELNLGRREEYDVLDKRRGRDPEMGGKPRRKNPQEGLYNELQKDKMAEAYSEIGMKGERRRGKGHDGLYQGLSTATKDTYDALHMQALPPR

SEQ ID NO: 1570 - protein, 470 aa, Artificial Sequence
  source: /note="Description of Artificial Sequence: Synthetic Chimeric Antigen Receptor sequence"
MALPVTALLLPLALLLHAARPEVQLVESGGGLVQPGRSLRLSCTASGFTFTDYYMSWVRQAPGKGLEWVGLIRSKADGYTTEYAASVKGRFTISRDDSKSIAYLQMNSLKTEDTAVYYCARDAAYYSYYSPEGAMDYWGQGTLVTVSSGGGGSGGGGSGGGGSMADYKDIQMTQSPSSVSASVGDRVTITCRASQNVDSAVAWYQQKPGKAPKALIYSASYRYSGVPSRFSGRGSGTDFTLTISSLQPEDFATYYCQQYYSTPWTFGQGTKVEIKRGLAVSTISSFFPPGYQIYIWAPLAGTCGVLLLSLVITLYCKRGRKKLLYIFKQPFMRPVQTTQEEDGCSCRFPEEEEGGCELRVKFSRSADAPAYQQGQNQLYNELNLGRREEYDVLDKRRGRDPEMGGKPRRKNPQEGLYNELQKDKMAEAYSEIGMKGERRRGKGHDGLYQGLSTATKDTYDALHMQALPPR

SEQ ID NO: 1571 - protein, 470 aa, Artificial Sequence
  source: /note="Description of Artificial Sequence: Synthetic Chimeric Antigen Receptor sequence"
MALPVTALLLPLALLLHAARPEVQLVESGGGLVQPGRSLRLSCTASGFTFTDYYMSWVRQAPGKGLEWVGLIRSKADGYTTEYAASVKGRFTISRDDSKSIAYLQMNSLKTEDTAVYYCARDAAYYSYYSPEGAMDYWGQGTLVTVSSGGGGSGGGGSGGGGSMADYKDIQMTQSPSSVSASVGDRVTITCRASQNVDSAVAWYQQKPGKAPKALIYSASYRYSGVPSRFSGSGSGTDFTLTISSLQPEDFATYYCQQYYSTPWTFGQGTKVEIKRGLAVSTISSFFPPGYQIYIWAPLAGTCGVLLLSLVITLYCKRGRKKLLYIFKQPFMRPVQTTQEEDGCSCRFPEEEEGGCELRVKFSRSADAPAYQQGQNQLYNELNLGRREEYDVLDKRRGRDPEMGGKPRRKNPQEGLYNELQKDKMAEAYSEIGMKGERRRGKGHDGLYQGLSTATKDTYDALHMQALPPR

SEQ ID NO: 1572 - protein, 470 aa, Artificial Sequence
  source: /note="Description of Artificial Sequence: Synthetic Chimeric Antigen Receptor sequence"
MALPVTALLLPLALLLHAARPEVQLVESGGGLVQPGRSLRLSCTASGFTFTDYYMSWVRQAPGKGLEWVGLIRSKADGYTTEYAASVKGRFTISRDDSKSIAYLQMNSLKTEDTAVYYCARDAAYYSYYSPEGAMDYWGQGTLVTVSSGGGGSGGGGSGGGGSMADYKDIQMTQSPSSVSASVGDRVTITCRASQNVDSAVAWYQQKPGKAPKLLIYSASYGQSGVPSRFSGSGSGTDFTLTISSLQPEDFATYYCQQYYSTPWTFGQGTKVEIKRGLAVSTISSFFPPGYQIYIWAPLAGTCGVLLLSLVITLYCKRGRKKLLYIFKQPFMRPVQTTQEEDGCSCRFPEEEEGGCELRVKFSRSADAPAYQQGQNQLYNELNLGRREEYDVLDKRRGRDPEMGGKPRRKNPQEGLYNELQKDKMAEAYSEIGMKGERRRGKGHDGLYQGLSTATKDTYDALHMQALPPR

SEQ ID NO: 1573 - protein, 470 aa, Artificial Sequence
  source: /note="Description of Artificial Sequence: Synthetic Chimeric Antigen Receptor sequence"
MALPVTALLLPLALLLHAARPEVQLVESGGGLVQPGRSLRLSCTASGFTFTDYYMSWVRQAPGKGLEWVGLIRSKADGYTTEYAASVKGRFTISRDDSKSIAYLQMNSLKTEDTAVYYCARDAAYYSYYSPEGAMDYWGQGTLVTVSSGGGGSGGGGSGGGGSMADYKDIQMTQSPSSVSASVGDRVTITCRASQNVDSAVAWYQQKPGKAPKLLIYSASYRQSGVPSRFSGSGSGTDFTLTISSLQPEDFATYYCQQYYSTPWTFGQGTKVEIKRGLAVSTISSFFPPGYQIYIWAPLAGTCGVLLLSLVITLYCKRGRKKLLYIFKQPFMRPVQTTQEEDGCSCRFPEEEEGGCELRVKFSRSADAPAYQQGQNQLYNELNLGRREEYDVLDKRRGRDPEMGGKPRRKNPQEGLYNELQKDKMAEAYSEIGMKGERRRGKGHDGLYQGLSTATKDTYDALHMQALPPR

SEQ ID NO: 1574 - protein, 470 aa, Artificial Sequence
  source: /note="Description of Artificial Sequence: Synthetic Chimeric Antigen Receptor sequence"
MALPVTALLLPLALLLHAARPEVQLVESGGGLVQPGRSLRLSCTASGFTFTDYYMSWVRQAPGKGLEWVGLIRSKADGYTTEYAASVKGRFTISRDDSKSIAYLQMNSLKTEDTAVYYCARDAAYYSYYSPEGAMDYWGQGTLVTVSSGGGGSGGGGSGGGGSMADYKDIQMTQSPSSVSASVGDRVTITCRASQNVDSAVAWYQQKPGKAPKLLIYSASYRYSGVPSRFSGSGSGTDFTLTISSLQPEDFATYYCQQYYSTPWTFGQGTKVEIKRGLAVSTISSFFPPGYQIYIWAPLAGTCGVLLLSLVITLYCKRGRKKLLYIFKQPFMRPVQTTQEEDGCSCRFPEEEEGGCELRVKFSRSADAPAYQQGQNQLYNELNLGRREEYDVLDKRRGRDPEMGGKPRRKNPQEGLYNELQKDKMAEAYSEIGMKGERRRGKGHDGLYQGLSTATKDTYDALHMQALPPR

SEQ ID NO: 1575 - protein, 470 aa, Artificial Sequence
  source: /note="Description of Artificial Sequence: Synthetic Chimeric Antigen Receptor sequence"
MALPVTALLLPLALLLHAARPEVQLVESGGGLVQPGRSLRLSCTASGFTFTDYYMSWVRQAPGKGLEWVGLIRSKADGYTTEYAASVKGRFTISRDDSKSIAYLQMNSLKTEDTAVYYCARDAAYYSYYSPEGAMDYWGQGTLVTVSSGGGGSGGGGSGGGGSMADYKDIVMTQSPSSVSASVGDRVTITCRASQNVDSAVAWYQQKPGKAPKALIYSASYRYSGVPSRFSGRGSGTDFTLTISSLQPEDFATYYCQQYYSTPWTFGQGTKVEIKRGLAVSTISSFFPPGYQIYIWAPLAGTCGVLLLSLVITLYCKRGRKKLLYIFKQPFMRPVQTTQEEDGCSCRFPEEEEGGCELRVKFSRSADAPAYQQGQNQLYNELNLGRREEYDVLDKRRGRDPEMGGKPRRKNPQEGLYNELQKDKMAEAYSEIGMKGERRRGKGHDGLYQGLSTATKDTYDALHMQALPPR

SEQ ID NO: 1576 - protein, 470 aa, Artificial Sequence
  source: /note="Description of Artificial Sequence: Synthetic Chimeric Antigen Receptor sequence"
MALPVTALLLPLALLLHAARPEVQLVESGGGLVQPGRSLRLSCTASGFTFTDYYMSWVRQAPGKGLEWVGLIRSKADGYTTEYSASVKGRFTISRDDSKSIAYLQMNSLKTEDTAVYYCARDAAYYSYYSPEGAMDYWGQGTLVTVSSGGGGSGGGGSGGGGSMADYKDIQMTQSPSSVSASVGDRVTITCRASQNVDSAVAWYQQKPGKAPKALIYSASYRYSGVPSRFSGRGSGTDFTLTISSLQPEDFATYYCQQYYSTPWTFGQGTKVEIKRGLAVSTISSFFPPGYQIYIWAPLAGTCGVLLLSLVITLYCKRGRKKLLYIFKQPFMRPVQTTQEEDGCSCRFPEEEEGGCELRVKFSRSADAPAYQQGQNQLYNELNLGRREEYDVLDKRRGRDPEMGGKPRRKNPQEGLYNELQKDKMAEAYSEIGMKGERRRGKGHDGLYQGLSTATKDTYDALHMQALPPR

SEQ ID NO: 1577 - protein, 470 aa, Artificial Sequence
  source: /note="Description of Artificial Sequence: Synthetic Chimeric Antigen Receptor sequence"
MALPVTALLLPLALLLHAARPEVQLVESGGGLVQPGRSLRLSCTASGFTFTDYYMSWVRQAPGKGLEWVGLIRSKADGYTTEYSASVKGRFTISRDDSKSIAYLQMNSLKTEDTAVYYCARDAAYYSYYSPEGAMDYWGQGTLVTVSSGGGGSGGGGSGGGGSMADYKDIQMTQSPSSVSASVGDRVTITCRASQNVDSAVAWYQQKPGKAPKALIYSASYRYSGVPSRFSGSGSGTDFTLTISSLQPEDFATYYCQQYYSTPWTFGQGTKVEIKRGLAVSTISSFFPPGYQIYIWAPLAGTCGVLLLSLVITLYCKRGRKKLLYIFKQPFMRPVQTTQEEDGCSCRFPEEEEGGCELRVKFSRSADAPAYQQGQNQLYNELNLGRREEYDVLDKRRGRDPEMGGKPRRKNPQEGLYNELQKDKMAEAYSEIGMKGERRRGKGHDGLYQGLSTATKDTYDALHMQALPPR

SEQ ID NO: 1578 - protein, 470 aa, Artificial Sequence
  source: /note="Description of Artificial Sequence: Synthetic Chimeric Antigen Receptor sequence"
MALPVTALLLPLALLLHAARPEVQLVESGGGLVQPGRSLRLSCTASGFTFTDYYMSWVRQAPGKGLEWVGLIRSKADGYTTEYSASVKGRFTISRDDSKSIAYLQMNSLKTEDTAVYYCARDAAYYSYYSPEGAMDYWGQGTLVTVSSGGGGSGGGGSGGGGSMADYKDIQMTQSPSSVSASVGDRVTITCRASQNVDSAVAWYQQKPGKAPKLLIYSASYGQSGVPSRFSGSGSGTDFTLTISSLQPEDFATYYCQQYYSTPWTFGQGTKVEIKRGLAVSTISSFFPPGYQIYIWAPLAGTCGVLLLSLVITLYCKRGRKKLLYIFKQPFMRPVQTTQEEDGCSCRFPEEEEGGCELRVKFSRSADAPAYQQGQNQLYNELNLGRREEYDVLDKRRGRDPEMGGKPRRKNPQEGLYNELQKDKMAEAYSEIGMKGERRRGKGHDGLYQGLSTATKDTYDALHMQALPPR

SEQ ID NO: 1579 - protein, 470 aa, Artificial Sequence
  source: /note="Description of Artificial Sequence: Synthetic Chimeric Antigen Receptor sequence"
MALPVTALLLPLALLLHAARPEVQLVESGGGLVQPGRSLRLSCTASGFTFTDYYMSWVRQAPGKGLEWVGLIRSKADGYTTEYSASVKGRFTISRDDSKSIAYLQMNSLKTEDTAVYYCARDAAYYSYYSPEGAMDYWGQGTLVTVSSGGGGSGGGGSGGGGSMADYKDIQMTQSPSSVSASVGDRVTITCRASQNVDSAVAWYQQKPGKAPKLLIYSASYRQSGVPSRFSGSGSGTDFTLTISSLQPEDFATYYCQQYYSTPWTFGQGTKVEIKRGLAVSTISSFFPPGYQIYIWAPLAGTCGVLLLSLVITLYCKRGRKKLLYIFKQPFMRPVQTTQEEDGCSCRFPEEEEGGCELRVKFSRSADAPAYQQGQNQLYNELNLGRREEYDVLDKRRGRDPEMGGKPRRKNPQEGLYNELQKDKMAEAYSEIGMKGERRRGKGHDGLYQGLSTATKDTYDALHMQALPPR

SEQ ID NO: 1580 - protein, 470 aa, Artificial Sequence
  source: /note="Description of Artificial Sequence: Synthetic Chimeric Antigen Receptor sequence"
MALPVTALLLPLALLLHAARPEVQLVESGGGLVQPGRSLRLSCTASGFTFTDYYMSWVRQAPGKGLEWVGLIRSKADGYTTEYSASVKGRFTISRDDSKSIAYLQMNSLKTEDTAVYYCARDAAYYSYYSPEGAMDYWGQGTLVTVSSGGGGSGGGGSGGGGSMADYKDIQMTQSPSSVSASVGDRVTITCRASQNVDSAVAWYQQKPGKAPKLLIYSASYRYSGVPSRFSGSGSGTDFTLTISSLQPEDFATYYCQQYYSTPWTFGQGTKVEIKRGLAVSTISSFFPPGYQIYIWAPLAGTCGVLLLSLVITLYCKRGRKKLLYIFKQPFMRPVQTTQEEDGCSCRFPEEEEGGCELRVKFSRSADAPAYQQGQNQLYNELNLGRREEYDVLDKRRGRDPEMGGKPRRKNPQEGLYNELQKDKMAEAYSEIGMKGERRRGKGHDGLYQGLSTATKDTYDALHMQALPPR

SEQ ID NO: 1581 - protein, 470 aa, Artificial Sequence
  source: /note="Description of Artificial Sequence: Synthetic Chimeric Antigen Receptor sequence"
MALPVTALLLPLALLLHAARPEVQLVESGGGLVQPGRSLRLSCTASGFTFTDYYMSWVRQAPGKGLEWVGLIRSKADGYTTEYSASVKGRFTISRDDSKSIAYLQMNSLKTEDTAVYYCARDAAYYSYYSPEGAMDYWGQGTLVTVSSGGGGSGGGGSGGGGSMADYKDIVMTQSPSSVSASVGDRVTITCRASQNVDSAVAWYQQKPGKAPKALIYSASYRYSGVPSRFSGRGSGTDFTLTISSLQPEDFATYYCQQYYSTPWTFGQGTKVEIKRGLAVSTISSFFPPGYQIYIWAPLAGTCGVLLLSLVITLYCKRGRKKLLYIFKQPFMRPVQTTQEEDGCSCRFPEEEEGGCELRVKFSRSADAPAYQQGQNQLYNELNLGRREEYDVLDKRRGRDPEMGGKPRRKNPQEGLYNELQKDKMAEAYSEIGMKGERRRGKGHDGLYQGLSTATKDTYDALHMQALPPR

SEQ ID NO: 1582 - protein, 470 aa, Artificial Sequence
  source: /note="Description of Artificial Sequence: Synthetic Chimeric Antigen Receptor sequence"
MALPVTALLLPLALLLHAARPEVQLVESGGGLVQPGRSLRLSCTASGFTFTDYYMSWVRQAPGKGLEWVGLIRSKADGYTTEYSASVKGRFTISRDDSKSILYLQMNSLKTEDTAVYYCARDAAYYSYYSPEGAMDYWGQGTLVTVSSGGGGSGGGGSGGGGSMADYKDIQMTQSPSSVSASVGDRVTITCRASQNVDSAVAWYQQKPGKAPKALIYSASYRYSGVPSRFSGRGSGTDFTLTISSLQPEDFATYYCQQYYSTPWTFGQGTKVEIKRGLAVSTISSFFPPGYQIYIWAPLAGTCGVLLLSLVITLYCKRGRKKLLYIFKQPFMRPVQTTQEEDGCSCRFPEEEEGGCELRVKFSRSADAPAYQQGQNQLYNELNLGRREEYDVLDKRRGRDPEMGGKPRRKNPQEGLYNELQKDKMAEAYSEIGMKGERRRGKGHDGLYQGLSTATKDTYDALHMQALPPR

SEQ ID NO: 1583 - protein, 470 aa, Artificial Sequence
  source: /note="Description of Artificial Sequence: Synthetic Chimeric Antigen Receptor sequence"
MALPVTALLLPLALLLHAARPEVQLVESGGGLVQPGRSLRLSCTASGFTFTDYYMSWVRQAPGKGLEWVGLIRSKADGYTTEYSASVKGRFTISRDDSKSILYLQMNSLKTEDTAVYYCARDAAYYSYYSPEGAMDYWGQGTLVTVSSGGGGSGGGGSGGGGSMADYKDIQMTQSPSSVSASVGDRVTITCRASQNVDSAVAWYQQKPGKAPKALIYSASYRYSGVPSRFSGSGSGTDFTLTISSLQPEDFATYYCQQYYSTPWTFGQGTKVEIKRGLAVSTISSFFPPGYQIYIWAPLAGTCGVLLLSLVITLYCKRGRKKLLYIFKQPFMRPVQTTQEEDGCSCRFPEEEEGGCELRVKFSRSADAPAYQQGQNQLYNELNLGRREEYDVLDKRRGRDPEMGGKPRRKNPQEGLYNELQKDKMAEAYSEIGMKGERRRGKGHDGLYQGLSTATKDTYDALHMQALPPR

SEQ ID NO: 1584 - protein, 470 aa, Artificial Sequence
  source: /note="Description of Artificial Sequence: Synthetic Chimeric Antigen Receptor sequence"
MALPVTALLLPLALLLHAARPEVQLVESGGGLVQPGRSLRLSCTASGFTFTDYYMSWVRQAPGKGLEWVGLIRSKADGYTTEYSASVKGRFTISRDDSKSILYLQMNSLKTEDTAVYYCARDAAYYSYYSPEGAMDYWGQGTLVTVSSGGGGSGGGGSGGGGSMADYKDIQMTQSPSSVSASVGDRVTITCRASQNVDSAVAWYQQKPGKAPKLLIYSASYGQSGVPSRFSGSGSGTDFTLTISSLQPEDFATYYCQQYYSTPWTFGQGTKVEIKRGLAVSTISSFFPPGYQIYIWAPLAGTCGVLLLSLVITLYCKRGRKKLLYIFKQPFMRPVQTTQEEDGCSCRFPEEEEGGCELRVKFSRSADAPAYQQGQNQLYNELNLGRREEYDVLDKRRGRDPEMGGKPRRKNPQEGLYNELQKDKMAEAYSEIGMKGERRRGKGHDGLYQGLSTATKDTYDALHMQALPPR

SEQ ID NO: 1585 - protein, 470 aa, Artificial Sequence
  source: /note="Description of Artificial Sequence: Synthetic Chimeric Antigen Receptor sequence"
MALPVTALLLPLALLLHAARPEVQLVESGGGLVQPGRSLRLSCTASGFTFTDYYMSWVRQAPGKGLEWVGLIRSKADGYTTEYSASVKGRFTISRDDSKSILYLQMNSLKTEDTAVYYCARDAAYYSYYSPEGAMDYWGQGTLVTVSSGGGGSGGGGSGGGGSMADYKDIQMTQSPSSVSASVGDRVTITCRASQNVDSAVAWYQQKPGKAPKLLIYSASYRQSGVPSRFSGSGSGTDFTLTISSLQPEDFATYYCQQYYSTPWTFGQGTKVEIKRGLAVSTISSFFPPGYQIYIWAPLAGTCGVLLLSLVITLYCKRGRKKLLYIFKQPFMRPVQTTQEEDGCSCRFPEEEEGGCELRVKFSRSADAPAYQQGQNQLYNELNLGRREEYDVLDKRRGRDPEMGGKPRRKNPQEGLYNELQKDKMAEAYSEIGMKGERRRGKGHDGLYQGLSTATKDTYDALHMQALPPR

SEQ ID NO: 1586 - protein, 470 aa, Artificial Sequence
  source: /note="Description of Artificial Sequence: Synthetic Chimeric Antigen Receptor sequence"
MALPVTALLLPLALLLHAARPEVQLVESGGGLVQPGRSLRLSCTASGFTFTDYYMSWVRQAPGKGLEWVGLIRSKADGYTTEYSASVKGRFTISRDDSKSILYLQMNSLKTEDTAVYYCARDAAYYSYYSPEGAMDYWGQGTLVTVSSGGGGSGGGGSGGGGSMADYKDIQMTQSPSSVSASVGDRVTITCRASQNVDSAVAWYQQKPGKAPKLLIYSASYRYSGVPSRFSGSGSGTDFTLTISSLQPEDFATYYCQQYYSTPWTFGQGTKVEIKRGLAVSTISSFFPPGYQIYIWAPLAGTCGVLLLSLVITLYCKRGRKKLLYIFKQPFMRPVQTTQEEDGCSCRFPEEEEGGCELRVKFSRSADAPAYQQGQNQLYNELNLGRREEYDVLDKRRGRDPEMGGKPRRKNPQEGLYNELQKDKMAEAYSEIGMKGERRRGKGHDGLYQGLSTATKDTYDALHMQALPPR

SEQ ID NO: 1587 - protein, 470 aa, Artificial Sequence
  source: /note="Description of Artificial Sequence: Synthetic Chimeric Antigen Receptor sequence"
MALPVTALLLPLALLLHAARPEVQLVESGGGLVQPGRSLRLSCTASGFTFTDYYMSWVRQAPGKGLEWVGLIRSKADGYTTEYSASVKGRFTISRDDSKSILYLQMNSLKTEDTAVYYCARDAAYYSYYSPEGAMDYWGQGTLVTVSSGGGGSGGGGSGGGGSMADYKDIVMTQSPSSVSASVGDRVTITCRASQNVDSAVAWYQQKPGKAPKALIYSASYRYSGVPSRFSGRGSGTDFTLTISSLQPEDFATYYCQQYYSTPWTFGQGTKVEIKRGLAVSTISSFFPPGYQIYIWAPLAGTCGVLLLSLVITLYCKRGRKKLLYIFKQPFMRPVQTTQEEDGCSCRFPEEEEGGCELRVKFSRSADAPAYQQGQNQLYNELNLGRREEYDVLDKRRGRDPEMGGKPRRKNPQEGLYNELQKDKMAEAYSEIGMKGERRRGKGHDGLYQGLSTATKDTYDALHMQALPPR

SEQ ID NO: 1588 - protein, 470 aa, Artificial Sequence
  source: /note="Description of Artificial Sequence: Synthetic Chimeric Antigen Receptor sequence"
QIQLVQSGPELKKPGETVKISCKASGYIFTNYGMNWVKQAPGKSFKWMGWINTYTGESTYSADFKGRFAFSLETSASTAYLHINDLKNEDTATYFCARSGGYDPMDYWGQGTSVTVSSGGGGSGGGGSGGGGSDIVLTQSPASLAVSLGQRATISCRASESVDNYGNTFMHWYQQKPGQPPKLLIYRASNLESGIPARFSGSGSRTDFTLTINPVEADDVATYYCQQSNEDPPTFGAGTKLELKTTTPAPRPPTPAPTIASQPLSLRPEACRPAAGGAVHTRGLDFACDIISFFLALTSTALLFLLFFLTLRFSVVKRGRKKLLYIFKQPFMRPVQTTQEEDGCSCRFPEEEEGGCELRVKFSRSADAPAYQQGQNQLYNELNLGRREEYDVLDKRRGRDPEMGGKPRRKNPQEGLYNELQKDKMAEAYSEIGMKGERRRGKGHDGLYQGLSTATKDTYDALHMQALPPR

SEQ ID NO: 1589 - protein, 470 aa, Artificial Sequence
  source: /note="Description of Artificial Sequence: Synthetic Chimeric Antigen Receptor sequence"
VQLQESGPGLVKPSQSLSLTCSVTDYSITSGYYWNWIRQFPGNKLEWMGYISYDGSNNYNPSLKNRISITRDTSKNQFFLKLSSVTTEDTATYYCSRGEGFYFDSWGQGTTLTVSSARSGGGGSGGGGSGGGGSDIMMSQSPSSLAVSVGEKFTMTCKSSQSLFFGSTQKNYLAWYQQKPGQSPKLLIYWASTRESGVPDRFTGSGSGTDFTLAISSVMPEDLAVYYCQQYYNYPWTFGGGTKLEIKTTTPAPRPPTPAPTIASQPLSLRPEACRPAAGGAVHTRGLDFACDIYIWAPLAGTCGVLLLSLVITLYCKRGRKKLLYIFKQPFMRPVQTTQEEDGCSCRFPEEEEGGCELRVKFSRSADAPAYQQGQNQLYNELNLGRREEYDVLDKRRGRDPEMGGKPRRKNPQEGLYNELQKDKMAEAYSEIGMKGERRRGKGHDGLYQGLSTATKDTYDALHMQALPPR

SEQ ID NO: 1590 - protein, 471 aa, Artificial Sequence
  source: /note="Description of Artificial Sequence: Synthetic Chimeric Antigen Receptor sequence"
EVQLVESGGGLVQPGRSLRLSCTASGFTFTDYYMSWVRQAPGKGLEWVGLIRSKADGYTTEYAASVKGRFTISRDDSQSIAYLQMNSLKTEDTAVYYCARDAAYYSYYSPEGAMDYGQGTLVTVSSGGGGSGGGGSGGGGSDIQMTQSPSSVSASVGDRVTITCRASQNVDSAVAYQQKPGKAPKALIYSASYRYSGVPSRFSGSGSGTDFTLTISSLQPEDFATYYCQQYYSTPWTFGQGTKVEIKRTTTPAPRPPTPAPTIASQPLSLRPEACRPAAGGAVHTRGLDFACDIYIWAPLAGTCGVLLLSLVITLYCKRGRKKLLYIFKQPFMRPVQTTQEEDGCSCRFPEEEEGGCELRVKFSRSADAPAYQQGQNQLYNELNLGRREEYDVLDKRRGRDPEMGGKPRRKNPQEGLYNELQKDKMAEAYSEIGMKGERRRGKGHDGLYQGLSTATKDTYDALHMQALPPR

SEQ ID NO: 1591 - protein, 471 aa, Artificial Sequence
  source: /note="Description of Artificial Sequence: Synthetic Chimeric Antigen Receptor sequence"
EVQLVESGGGLVQPGRSLRLSCTASGFTFTDYYMSWVRQAPGKGLEWVGLIRSKADGYTTEYAASVKGRFTISRDDSQSIAYLQMNSLKTEDTAVYYCARDAAYYSYYSPEGAMDYGQGTLVTVSSGGGGSGGGGSGGGGSDIVMTQSPSSVSASVGDRVTITCRASQNVDSAVAYQQKPGKAPKALIYSASYRYSGVPSRFSGRGSGTDFTLTISSLQPEDFATYYCQQYYSTPWTFGQGTKVEIKRTTTPAPRPPTPAPTIASQPLSLRPEACRPAAGGAVHTRGLDFACDIYIWAPLAGTCGVLLLSLVITLYCKRGRKKLLYIFKQPFMRPVQTTQEEDGCSCRFPEEEEGGCELRVKFSRSADAPAYQQGQNQLYNELNLGRREEYDVLDKRRGRDPEMGGKPRRKNPQEGLYNELQKDKMAEAYSEIGMKGERRRGKGHDGLYQGLSTATKDTYDALHMQALPPR

SEQ ID NO: 1592 - protein, 471 aa, Artificial Sequence
  source: /note="Description of Artificial Sequence: Synthetic Chimeric Antigen Receptor sequence"
EVQLVESGGGLVQPGRSLRLSCTASGFTFTDYYMSWVRQAPGKGLEWVGLIRSKADGYTTEYSASVKGRFTISRDDSQSIAYLQMNSLKTEDTAVYYCARDAAYYSYYSPEGAMDYGQGTLVTVSSGGGGSGGGGSGGGGSDIQMTQSPSSVSASVGDRVTITCKASQNVDSAVAYQQKPGKAPKLLIYSASYRYSGVPSRFSGSGSGTDFTLTISSLQPEDFATYYCQQYYSTPWTFGQGTKVEIKRTTTPAPRPPTPAPTIASQPLSLRPEACRPAAGGAVHTRGLDFACDIYIWAPLAGTCGVLLLSLVITLYCKRGRKKLLYIFKQPFMRPVQTTQEEDGCSCRFPEEEEGGCELRVKFSRSADAPAYQQGQNQLYNELNLGRREEYDVLDKRRGRDPEMGGKPRRKNPQEGLYNELQKDKMAEAYSEIGMKGERRRGKGHDGLYQGLSTATKDTYDALHMQALPPR

SEQ ID NO: 1593 - protein, 471 aa, Artificial Sequence
  source: /note="Description of Artificial Sequence: Synthetic Chimeric Antigen Receptor sequence"
EVQLVESGGGLVQPGRSLRLSCTASGFTFTDYYMSWVRQAPGKGLEWVGLIRSKADGYTTEYSASVKGRFTISRDDSQSIAYLQMNSLKTEDTAVYYCARDAAYYSYYSPEGAMDYGQGTLVTVSSGGGGSGGGGSGGGGSDIQMTQSPSSVSASVGDRVTITCRASQVDSAVAWYQQKPGKAPKALIYSASYRYSGVPSRFSGSGSGTDFTLTISSLQPEDFATYYCGQYYSTPWTFGQGTKVEIKRTTTPAPRPPTPAPTIASQPLSLRPEACRPAAGGAVHTRGLDFACDIYIWAPLAGTCGVLLLSLVITLYCKRGRKKLLYIFKQPFMRPVQTTQEEDGCSCRFPEEEEGGCELRVKFSRSADAPAYQQGQNQLYNELNLGRREEYDVLDKRRGRDPEMGGKPRRKNPQEGLYNELQKDKMAEAYSEIGMKGERRRGKGHDGLYQGLSTATKDTYDALHMQALPPR

SEQ ID NO: 1594 - protein, 473 aa, Artificial Sequence
  source: /note="Description of Artificial Sequence: Synthetic Chimeric Antigen Receptor sequence"
EVQLVESGGGLVQPGRSLRLSCTASGFTFTDYYMSWVRQAPGKGLEWVGLIRSKADGYTTEYSASVKGRFTISRDDSKSILYLQMNSLKTEDTAVYYCARDAAYYSYYSPEGAMDYWGQGTLVTVSSGGGGSGGGGSGGGGSDIVMTQSPSSVSASVGDRVTITCRASQNVDSAVAWYQQKPGKAPKALIYSASYRYSGVPSRFSGRGSGTDFTLTISSLQPEDFATYYCQQYYSTPWTFGQGTKVEIKRTTTPAPRPPTPAPTIASQPLSLRPEACRPAAGGAVHTRGLDFACDIYIWAPLAGTCGVLLLSLVITLYCKRGRKKLLYIFKQPFMRPVQTTQEEDGCSCRFPEEEEGGCELRVKFSRSADAPAYQQGQNQLYNELNLGRREEYDVLDKRRGRDPEMGGKPRRKNPQEGLYNELQKDKMAEAYSEIGMKGERRRGKGHDGLYQGLSTATKDTYDALHMQALPPR

SEQ ID NO: 1595 - protein, 478 aa, Artificial Sequence
  source: /note="Description of Artificial Sequence: Synthetic Chimeric Antigen Receptor sequence"
EVKLVESGGGLVQPGGSLSLSCAASGFTFTDYYMSWVRQPPGKALEWLALIRSKADGYTTEYSASVKGRFTLSRDDSQSILYLQMNALRPEDSATYYCARDAAYYSYYSPEGAMDYWGQGTSVTVSSGGGGSGGGGSGGGGSMADYKDIVMTQSHKFMSTSVGDRVNITCKASQNVDSAVAWYQQKPGQSPKALIYSASYRYSGVPDRFTGRGSGTDFTLTISSVQAEDLAVYYCQQYYSTPWTFGGGTKLEIKRTTTPAPRPPTPAPTIASQPLSLRPEACRPAAGGAVHTRGLDFACDIYIWAPLAGTCGVLLLSLVITLYCKRGRKKLLYIFKQPFMRPVQTTQEEDGCSCRFPEEEEGGCELRVKFSRSADAPAYQQGQNQLYNELNLGRREEYDVLDKRRGRDPEMGGKPRRKNPQEGLYNELQKDKMAEAYSEIGMKGERRRGKGHDGLYQGLSTATKDTYDALHMQALPPR

SEQ ID NO: 1596 - protein, 481 aa, Artificial Sequence
  source: /note="Description of Artificial Sequence: Synthetic Chimeric Antigen Receptor sequence"
EVKLVESGGGLVQPGGSLSLSCAASGFTFTDYYMSWVRQPPGKALEWLALIRSKADGYTTEYSASVKGRFTLSRDDSQSILYLQMNALRPEDSATYYCARDAAYYSYYSPEGAMDYWGQGTSVTVSSGGGGSGGGGSGGGGSMADYKDIVMTQSHKFMSTSVGDRVNITCKASQNVDSAVAWYQQKPGQSPKALIYSASYRYSGVPDRFTGRGSGTDFTLTISSVQAEDLAVYYCQQYYSTPWTFGGGTKLEIKRTTTPAPRPPTPAPTIASQPLSLRPEACRPAAGGAVHTRGLDFACDIISFFLALTSTALLFLLFFLTLRFSVVKRGRKKLLYIFKQPFMRPVQTTQEEDGCSCRFPEEEEGGCELRVKFSRSADAPAYQQGQNQLYNELNLGRREEYDVLDKRRGRDPEMGGKPRRKNPQEGLYNELQKDKMAEAYSEIGMKGERRRGKGHDGLYQGLSTATKDTYDALHMQALPPR

SEQ ID NO: 1597 - protein, 484 aa, Artificial Sequence
  source: /note="Description of Artificial Sequence: Synthetic Chimeric Antigen Receptor sequence"
MGWSWIFLFLVSGTGGVLSEVQLQQSGPELVKPGASVKMSCKASGYTFTDYYMKWVKQSHGKSLEWIGDIIPSNGATFYNQKFKGKATLTVDRSSSTAYMHLNSLTSEDSAVYYCTRSHLLRASWFAYWGQGTLVTVSAASGGGGSGGGGSGGGGSMESQTQVLMSLLFWVSGTCGDFVMTQSPSSLTVTAGEKVTMSCKSSQSLLNSGNQKNYLTWYLQKPGQPPKLLIYWASTRESGVPDRFTGSGSGTDFTLTISSVQAEDLAVYYCQNDYSYPYTFGGGTKLEIKRGLAVSTISSFFPPGYQIYIWAPLAGTCGVLLLSLVITLYCKRGRKKLLYIFKQPFMRPVQTTQEEDGCSCRFPEEEEGGCELRVKFSRSADAPAYQQGQNQLYNELNLGRREEYDVLDKRRGRDPEMGGKPRRKNPQEGLYNELQKDKMAEAYSEIGMKGERRRGKGHDGLYQGLSTATKDTYDALHMQALPPR

SEQ ID NO: 1598 - protein, 486 aa, Artificial Sequence
  source: /note="Description of Artificial Sequence: Synthetic Chimeric Antigen Receptor sequence"
MALPVTALLLPLALLLHAARPDVQLTQSPSFLSASVGDRVTITCRASKSISKDLAWYQQKPGKAPKLLIYSGSTLQSGVPSRFSGSGSGTEFTLTISSLQPEDFATYYCQQHNKYPYTFGGGTKVEIKGGGGSGGGGSGGGGSGGGGSEVQLVESGGGLVQPGGSLRLSCAASGYTFTSYWMNWVRQAPGKGLVWVSRIDPYDSETHYNQKFKDRFTISVDKAKSTAYLQMNSLRAEDTAVYYCARGNWDDYWGQGTTVTVSSTTTPAPRPPTPAPTIASQPLSLRPEACRPAAGGAVHTRGLDFACDIYIWAPLAGTCGVLLLSLVITLYCKRGRKKLLYIFKQPFMRPVQTTQEEDGCSCRFPEEEEGGCELRVKFSRSADAPAYKQGQNQLYNELNLGRREEYDVLDKRRGRDPEMGGKPRRKNPQEGLYNELQKDKMAEAYSEIGMKGERRRGKGHDGLYQGLSTATKDTYDALHMQALPPR

SEQ ID NO: 1599 - protein, 486 aa, Artificial Sequence
  source: /note="Description of Artificial Sequence: Synthetic Chimeric Antigen Receptor sequence"
MALPVTALLLPLALLLHAARPDVQLTQSPSFLSASVGDRVTITCRASKSISKDLAWYQQKPGKAPKLLIYSGSTLQSGVPSRFSGSGSGTEFTLTISSLQPEDFATYYCQQHNKYPYTFGGGTKVEIKGGGGSGGGGSGGGGSGGGGSEVQLVQSGAEVKKPGESLRISCKGSGYTFTSYWMNWVRQMPGKGLEWMGRIDPYDSETHYNQKFKDHVTISVDKSISTAYLQWSSLKASDTAMYYCARGNWDDYWGQGTTVTVSSTTTPAPRPPTPAPTIASQPLSLRPEACRPAAGGAVHTRGLDFACDIYIWAPLAGTCGVLLLSLVITLYCKRGRKKLLYIFKQPFMRPVQTTQEEDGCSCRFPEEEEGGCELRVKFSRSADAPAYKQGQNQLYNELNLGRREEYDVLDKRRGRDPEMGGKPRRKNPQEGLYNELQKDKMAEAYSEIGMKGERRRGKGHDGLYQGLSTATKDTYDALHMQALPPR

SEQ ID NO: 1600 - protein, 486 aa, Artificial Sequence
  source: /note="Description of Artificial Sequence: Synthetic Chimeric Antigen Receptor sequence"
MALPVTALLLPLALLLHAARPDVQLTQSPSFLSASVGDRVTITCRASKSISKDLAWYQQKPGKAPKLLIYSGSTLQSGVPSRFSGSGSGTEFTLTISSLQPEDFATYYCQQHNKYPYTFGGGTKVEIKGGGGSGGGGSGGGGSGGGGSQVQLVQSGAEVKKPGASVKVSCKASGYTFTSYWMNWVRQAPGQGLEWMGRIDPYDSETHYNQKFKDRVTMTVDKSTSTAYMELSSLRSEDTAVYYCARGNWDDYWGQGTTVTVSSTTTPAPRPPTPAPTIASQPLSLRPEACRPAAGGAVHTRGLDFACDIYIWAPLAGTCGVLLLSLVITLYCKRGRKKLLYIFKQPFMRPVQTTQEEDGCSCRFPEEEEGGCELRVKFSRSADAPAYKQGQNQLYNELNLGRREEYDVLDKRRGRDPEMGGKPRRKNPQEGLYNELQKDKMAEAYSEIGMKGERRRGKGHDGLYQGLSTATKDTYDALHMQALPPR

SEQ ID NO: 1601 - protein, 486 aa, Artificial Sequence
  source: /note="Description of Artificial Sequence: Synthetic Chimeric Antigen Receptor sequence"
MALPVTALLLPLALLLHAARPDVQLTQSPSFLSASVGDRVTITCRASKSISKDLAWYQQKPGKAPKLLIYSGSTLQSGVPSRFSGSGSGTEFTLTISSLQPEDFATYYCQQHNKYPYTFGGGTKVEIKGGGGSGGGGSGGGGSGGGGSQVQLVQSGSELKKPGASVKVSCKASGYTFTSYWMNWVRQAPGQGLEWMGRIDPYDSETHYNQKFKDRFVFSVDKSVSTAYLQISSLKAEDTAVYYCARGNWDDYWGQGTTVTVSSTTTPAPRPPTPAPTIASQPLSLRPEACRPAAGGAVHTRGLDFACDIYIWAPLAGTCGVLLLSLVITLYCKRGRKKLLYIFKQPFMRPVQTTQEEDGCSCRFPEEEEGGCELRVKFSRSADAPAYKQGQNQLYNELNLGRREEYDVLDKRRGRDPEMGGKPRRKNPQEGLYNELQKDKMAEAYSEIGMKGERRRGKGHDGLYQGLSTATKDTYDALHMQALPPR

SEQ ID NO: 1602 - protein, 486 aa, Artificial Sequence
  source: /note="Description of Artificial Sequence: Synthetic Chimeric Antigen Receptor sequence"
MALPVTALLLPLALLLHAARPDVVMTQSPAFLSVTPGEKVTITCRASKSISKDLAWYQQKPDQAPKLLIYSGSTLQSGVPSRFSGSGSGTDFTFTISSLEAEDAATYYCQQHNKYPYTFGGGTKVEIKGGGGSGGGGSGGGGSGGGGSEVQLVESGGGLVQPGGSLRLSCAASGYTFTSYWMNWVRQAPGKGLVWVSRIDPYDSETHYNQKFKDRFTISVDKAKSTAYLQMNSLRAEDTAVYYCARGNWDDYWGQGTTVTVSSTTTPAPRPPTPAPTIASQPLSLRPEACRPAAGGAVHTRGLDFACDIYIWAPLAGTCGVLLLSLVITLYCKRGRKKLLYIFKQPFMRPVQTTQEEDGCSCRFPEEEEGGCELRVKFSRSADAPAYKQGQNQLYNELNLGRREEYDVLDKRRGRDPEMGGKPRRKNPQEGLYNELQKDKMAEAYSEIGMKGERRRGKGHDGLYQGLSTATKDTYDALHMQALPPR

SEQ ID NO: 1603 - protein, 486 aa, Artificial Sequence
  source: /note="Description of Artificial Sequence: Synthetic Chimeric Antigen Receptor sequence"
MALPVTALLLPLALLLHAARPDVVMTQSPAFLSVTPGEKVTITCRASKSISKDLAWYQQKPDQAPKLLIYSGSTLQSGVPSRFSGSGSGTDFTFTISSLEAEDAATYYCQQHNKYPYTFGGGTKVEIKGGGGSGGGGSGGGGSGGGGSEVQLVQSGAEVKKPGESLRISCKGSGYTFTSYWMNWVRQMPGKGLEWMGRIDPYDSETHYNQKFKDHVTISVDKSISTAYLQWSSLKASDTAMYYCARGNWDDYWGQGTTVTVSSTTTPAPRPPTPAPTIASQPLSLRPEACRPAAGGAVHTRGLDFACDIYIWAPLAGTCGVLLLSLVITLYCKRGRKKLLYIFKQPFMRPVQTTQEEDGCSCRFPEEEEGGCELRVKFSRSADAPAYKQGQNQLYNELNLGRREEYDVLDKRRGRDPEMGGKPRRKNPQEGLYNELQKDKMAEAYSEIGMKGERRRGKGHDGLYQGLSTATKDTYDALHMQALPPR

SEQ ID NO: 1604 - protein, 486 aa, Artificial Sequence
  source: /note="Description of Artificial Sequence: Synthetic Chimeric Antigen Receptor sequence"
MALPVTALLLPLALLLHAARPDVVMTQSPAFLSVTPGEKVTITCRASKSISKDLAWYQQKPDQAPKLLIYSGSTLQSGVPSRFSGSGSGTDFTFTISSLEAEDAATYYCQQHNKYPYTFGGGTKVEIKGGGGSGGGGSGGGGSGGGGSQVQLVQSGAEVKKPGASVKVSCKASGYTFTSYWMNWVRQAPGQGLEWMGRIDPYDSETHYNQKFKDRVTMTVDKSTSTAYMELSSLRSEDTAVYYCARGNWDDYWGQGTTVTVSSTTTPAPRPPTPAPTIASQPLSLRPEACRPAAGGAVHTRGLDFACDIYIWAPLAGTCGVLLLSLVITLYCKRGRKKLLYIFKQPFMRPVQTTQEEDGCSCRFPEEEEGGCELRVKFSRSADAPAYKQGQNQLYNELNLGRREEYDVLDKRRGRDPEMGGKPRRKNPQEGLYNELQKDKMAEAYSEIGMKGERRRGKGHDGLYQGLSTATKDTYDALHMQALPPR

SEQ ID NO: 1605 - protein, 486 aa, Artificial Sequence
  source: /note="Description of Artificial Sequence: Synthetic Chimeric Antigen Receptor sequence"
MALPVTALLLPLALLLHAARPDVVMTQSPAFLSVTPGEKVTITCRASKSISKDLAWYQQKPDQAPKLLIYSGSTLQSGVPSRFSGSGSGTDFTFTISSLEAEDAATYYCQQHNKYPYTFGGGTKVEIKGGGGSGGGGSGGGGSGGGGSQVQLVQSGSELKKPGASVKVSCKASGYTFTSYWMNWVRQAPGQGLEWMGRIDPYDSETHYNQKFKDRFVFSVDKSVSTAYLQISSLKAEDTAVYYCARGNWDDYWGQGTTVTVSSTTTPAPRPPTPAPTIASQPLSLRPEACRPAAGGAVHTRGLDFACDIYIWAPLAGTCGVLLLSLVITLYCKRGRKKLLYIFKQPFMRPVQTTQEEDGCSCRFPEEEEGGCELRVKFSRSADAPAYKQGQNQLYNELNLGRREEYDVLDKRRGRDPEMGGKPRRKNPQEGLYNELQKDKMAEAYSEIGMKGERRRGKGHDGLYQGLSTATKDTYDALHMQALPPR

SEQ ID NO: 1606 - protein, 486 aa, Artificial Sequence
  source: /note="Description of Artificial Sequence: Synthetic Chimeric Antigen Receptor sequence"
MALPVTALLLPLALLLHAARPDVVMTQSPDSLAVSLGERATINCRASKSISKDLAWYQQKPGQPPKLLIYSGSTLQSGVPDRFSGSGSGTDFTLTISSLQAEDVAVYYCQQHNKYPYTFGGGTKVEIKGGGGSGGGGSGGGGSGGGGSEVQLVESGGGLVQPGGSLRLSCAASGYTFTSYWMNWVRQAPGKGLVWVSRIDPYDSETHYNQKFKDRFTISVDKAKSTAYLQMNSLRAEDTAVYYCARGNWDDYWGQGTTVTVSSTTTPAPRPPTPAPTIASQPLSLRPEACRPAAGGAVHTRGLDFACDIYIWAPLAGTCGVLLLSLVITLYCKRGRKKLLYIFKQPFMRPVQTTQEEDGCSCRFPEEEEGGCELRVKFSRSADAPAYKQGQNQLYNELNLGRREEYDVLDKRRGRDPEMGGKPRRKNPQEGLYNELQKDKMAEAYSEIGMKGERRRGKGHDGLYQGLSTATKDTYDALHMQALPPR

SEQ ID NO: 1607 - protein, 486 aa, Artificial Sequence
  source: /note="Description of Artificial Sequence: Synthetic Chimeric Antigen Receptor sequence"
MALPVTALLLPLALLLHAARPDVVMTQSPDSLAVSLGERATINCRASKSISKDLAWYQQKPGQPPKLLIYSGSTLQSGVPDRFSGSGSGTDFTLTISSLQAEDVAVYYCQQHNKYPYTFGGGTKVEIKGGGGSGGGGSGGGGSGGGGSEVQLVQSGAEVKKPGESLRISCKGSGYTFTSYWMNWVRQMPGKGLEWMGRIDPYDSETHYNQKFKDHVTISVDKSISTAYLQWSSLKASDTAMYYCARGNWDDYWGQGTTVTVSSTTTPAPRPPTPAPTIASQPLSLRPEACRPAAGGAVHTRGLDFACDIYIWAPLAGTCGVLLLSLVITLYCKRGRKKLLYIFKQPFMRPVQTTQEEDGCSCRFPEEEEGGCELRVKFSRSADAPAYKQGQNQLYNELNLGRREEYDVLDKRRGRDPEMGGKPRRKNPQEGLYNELQKDKMAEAYSEIGMKGERRRGKGHDGLYQGLSTATKDTYDALHMQALPPR

SEQ ID NO: 1608 - protein, 486 aa, Artificial Sequence
  source: /note="Description of Artificial Sequence: Synthetic Chimeric Antigen Receptor sequence"
MALPVTALLLPLALLLHAARPDVVMTQSPDSLAVSLGERATINCRASKSISKDLAWYQQKPGQPPKLLIYSGSTLQSGVPDRFSGSGSGTDFTLTISSLQAEDVAVYYCQQHNKYPYTFGGGTKVEIKGGGGSGGGGSGGGGSGGGGSQVQLVQSGAEVKKPGASVKVSCKASGYTFTSYWMNWVRQAPGQGLEWMGRIDPYDSETHYNQKFKDRVTMTVDKSTSTAYMELSSLRSEDTAVYYCARGNWDDYWGQGTTVTVSSTTTPAPRPPTPAPTIASQPLSLRPEACRPAAGGAVHTRGLDFACDIYIWAPLAGTCGVLLLSLVITLYCKRGRKKLLYIFKQPFMRPVQTTQEEDGCSCRFPEEEEGGCELRVKFSRSADAPAYKQGQNQLYNELNLGRREEYDVLDKRRGRDPEMGGKPRRKNPQEGLYNELQKDKMAEAYSEIGMKGERRRGKGHDGLYQGLSTATKDTYDALHMQALPPR

SEQ ID NO: 1609 - protein, 486 aa, Artificial Sequence
  source: /note="Description of Artificial Sequence: Synthetic Chimeric Antigen Receptor sequence"
MALPVTALLLPLALLLHAARPDVVMTQSPDSLAVSLGERATINCRASKSISKDLAWYQQKPGQPPKLLIYSGSTLQSGVPDRFSGSGSGTDFTLTISSLQAEDVAVYYCQQHNKYPYTFGGGTKVEIKGGGGSGGGGSGGGGSGGGGSQVQLVQSGSELKKPGASVKVSCKASGYTFTSYWMNWVRQAPGQGLEWMGRIDPYDSETHYNQKFKDRFVFSVDKSVSTAYLQISSLKAEDTAVYYCARGNWDDYWGQGTTVTVSSTTTPAPRPPTPAPTIASQPLSLRPEACRPAAGGAVHTRGLDFACDIYIWAPLAGTCGVLLLSLVITLYCKRGRKKLLYIFKQPFMRPVQTTQEEDGCSCRFPEEEEGGCELRVKFSRSADAPAYKQGQNQLYNELNLGRREEYDVLDKRRGRDPEMGGKPRRKNPQEGLYNELQKDKMAEAYSEIGMKGERRRGKGHDGLYQGLSTATKDTYDALHMQALPPR

SEQ ID NO: 1610 - protein, 486 aa, Artificial Sequence
  source: /note="Description of Artificial Sequence: Synthetic Chimeric Antigen Receptor sequence"
MALPVTALLLPLALLLHAARPEVQLVESGGGLVQPGGSLRLSCAASGYTFTSYWMNWVRQAPGKGLVWVSRIDPYDSETHYNQKFKDRFTISVDKAKSTAYLQMNSLRAEDTAVYYCARGNWDDYWGQGTTVTVSSGGGGSGGGGSGGGGSGGGGSDVQLTQSPSFLSASVGDRVTITCRASKSISKDLAWYQQKPGKAPKLLIYSGSTLQSGVPSRFSGSGSGTEFTLTISSLQPEDFATYYCQQHNKYPYTFGGGTKVEIKTTTPAPRPPTPAPTIASQPLSLRPEACRPAAGGAVHTRGLDFACDIYIWAPLAGTCGVLLLSLVITLYCKRGRKKLLYIFKQPFMRPVQTTQEEDGCSCRFPEEEEGGCELRVKFSRSADAPAYKQGQNQLYNELNLGRREEYDVLDKRRGRDPEMGGKPRRKNPQEGLYNELQKDKMAEAYSEIGMKGERRRGKGHDGLYQGLSTATKDTYDALHMQALPPR

SEQ ID NO: 1611 - protein, 486 aa, Artificial Sequence
  source: /note="Description of Artificial Sequence: Synthetic Chimeric Antigen Receptor sequence"
MALPVTALLLPLALLLHAARPEVQLVESGGGLVQPGGSLRLSCAASGYTFTSYWMNWVRQAPGKGLVWVSRIDPYDSETHYNQKFKDRFTISVDKAKSTAYLQMNSLRAEDTAVYYCARGNWDDYWGQGTTVTVSSGGGGSGGGGSGGGGSGGGGSDVVMTQSPAFLSVTPGEKVTITCRASKSISKDLAWYQQKPDQAPKLLIYSGSTLQSGVPSRFSGSGSGTDFTFTISSLEAEDAATYYCQQHNKYPYTFGGGTKVEIKTTTPAPRPPTPAPTIASQPLSLRPEACRPAAGGAVHTRGLDFACDIYIWAPLAGTCGVLLLSLVITLYCKRGRKKLLYIFKQPFMRPVQTTQEEDGCSCRFPEEEEGGCELRVKFSRSADAPAYKQGQNQLYNELNLGRREEYDVLDKRRGRDPEMGGKPRRKNPQEGLYNELQKDKMAEAYSEIGMKGERRRGKGHDGLYQGLSTATKDTYDALHMQALPPR

SEQ ID NO: 1612 - protein, 486 aa, Artificial Sequence
  source: /note="Description of Artificial Sequence: Synthetic Chimeric Antigen Receptor sequence"
MALPVTALLLPLALLLHAARPEVQLVESGGGLVQPGGSLRLSCAASGYTFTSYWMNWVRQAPGKGLVWVSRIDPYDSETHYNQKFKDRFTISVDKAKSTAYLQMNSLRAEDTAVYYCARGNWDDYWGQGTTVTVSSGGGGSGGGGSGGGGSGGGGSDVVMTQSPDSLAVSLGERATINCRASKSISKDLAWYQQKPGQPPKLLIYSGSTLQSGVPDRFSGSGSGTDFTLTISSLQAEDVAVYYCQQHNKYPYTFGGGTKVEIKTTTPAPRPPTPAPTIASQPLSLRPEACRPAAGGAVHTRGLDFACDIYIWAPLAGTCGVLLLSLVITLYCKRGRKKLLYIFKQPFMRPVQTTQEEDGCSCRFPEEEEGGCELRVKFSRSADAPAYKQGQNQLYNELNLGRREEYDVLDKRRGRDPEMGGKPRRKNPQEGLYNELQKDKMAEAYSEIGMKGERRRGKGHDGLYQGLSTATKDTYDALHMQALPPR

SEQ ID NO: 1613 - protein, 486 aa, Artificial Sequence
  source: /note="Description of Artificial Sequence: Synthetic Chimeric Antigen Receptor sequence"
MALPVTALLLPLALLLHAARPEVQLVESGGGLVQPGGSLRLSCAASGYTFTSYWMNWVRQAPGKGLVWVSRIDPYDSETHYNQKFKDRFTISVDKAKSTAYLQMNSLRAEDTAVYYCARGNWDDYWGQGTTVTVSSGGGGSGGGGSGGGGSGGGGSEVVLTQSPATLSLSPGERATLSCRASKSISKDLAWYQQKPGQAPRLLIYSGSTLQSGIPARFSGSGSGTDFTLTISSLEPEDFAVYYCQQHNKYPYTFGGGTKVEIKTTTPAPRPPTPAPTIASQPLSLRPEACRPAAGGAVHTRGLDFACDIYIWAPLAGTCGVLLLSLVITLYCKRGRKKLLYIFKQPFMRPVQTTQEEDGCSCRFPEEEEGGCELRVKFSRSADAPAYKQGQNQLYNELNLGRREEYDVLDKRRGRDPEMGGKPRRKNPQEGLYNELQKDKMAEAYSEIGMKGERRRGKGHDGLYQGLSTATKDTYDALHMQALPPR

SEQ ID NO: 1614 - protein, 486 aa, Artificial Sequence
  source: /note="Description of Artificial Sequence: Synthetic Chimeric Antigen Receptor sequence"
MALPVTALLLPLALLLHAARPEVQLVQSGAEVKKPGESLRISCKGSGYTFTSYWMNWVRQMPGKGLEWMGRIDPYDSETHYNQKFKDHVTISVDKSISTAYLQWSSLKASDTAMYYCARGNWDDYWGQGTTVTVSSGGGGSGGGGSGGGGSGGGGSDVQLTQSPSFLSASVGDRVTITCRASKSISKDLAWYQQKPGKAPKLLIYSGSTLQSGVPSRFSGSGSGTEFTLTISSLQPEDFATYYCQQHNKYPYTFGGGTKVEIKTTTPAPRPPTPAPTIASQPLSLRPEACRPAAGGAVHTRGLDFACDIYIWAPLAGTCGVLLLSLVITLYCKRGRKKLLYIFKQPFMRPVQTTQEEDGCSCRFPEEEEGGCELRVKFSRSADAPAYKQGQNQLYNELNLGRREEYDVLDKRRGRDPEMGGKPRRKNPQEGLYNELQKDKMAEAYSEIGMKGERRRGKGHDGLYQGLSTATKDTYDALHMQALPPR

SEQ ID NO: 1615 - protein, 486 aa, Artificial Sequence
  source: /note="Description of Artificial Sequence: Synthetic Chimeric Antigen Receptor sequence"
MALPVTALLLPLALLLHAARPEVQLVQSGAEVKKPGESLRISCKGSGYTFTSYWMNWVRQMPGKGLEWMGRIDPYDSETHYNQKFKDHVTISVDKSISTAYLQWSSLKASDTAMYYCARGNWDDYWGQGTTVTVSSGGGGSGGGGSGGGGSGGGGSDVVMTQSPAFLSVTPGEKVTITCRASKSISKDLAWYQQKPDQAPKLLIYSGSTLQSGVPSRFSGSGSGTDFTFTISSLEAEDAATYYCQQHNKYPYTFGGGTKVEIKTTTPAPRPPTPAPTIASQPLSLRPEACRPAAGGAVHTRGLDFACDIYIWAPLAGTCGVLLLSLVITLYCKRGRKKLLYIFKQPFMRPVQTTQEEDGCSCRFPEEEEGGCELRVKFSRSADAPAYKQGQNQLYNELNLGRREEYDVLDKRRGRDPEMGGKPRRKNPQEGLYNELQKDKMAEAYSEIGMKGERRRGKGHDGLYQGLSTATKDTYDALHMQALPPR

SEQ ID NO: 1616 - protein, 486 aa, Artificial Sequence
  source: /note="Description of Artificial Sequence: Synthetic Chimeric Antigen Receptor sequence"
MALPVTALLLPLALLLHAARPEVQLVQSGAEVKKPGESLRISCKGSGYTFTSYWMNWVRQMPGKGLEWMGRIDPYDSETHYNQKFKDHVTISVDKSISTAYLQWSSLKASDTAMYYCARGNWDDYWGQGTTVTVSSGGGGSGGGGSGGGGSGGGGSDVVMTQSPDSLAVSLGERATINCRASKSISKDLAWYQQKPGQPPKLLIYSGSTLQSGVPDRFSGSGSGTDFTLTISSLQAEDVAVYYCQQHNKYPYTFGGGTKVEIKTTTPAPRPPTPAPTIASQPLSLRPEACRPAAGGAVHTRGLDFACDIYIWAPLAGTCGVLLLSLVITLYCKRGRKKLLYIFKQPFMRPVQTTQEEDGCSCRFPEEEEGGCELRVKFSRSADAPAYKQGQNQLYNELNLGRREEYDVLDKRRGRDPEMGGKPRRKNPQEGLYNELQKDKMAEAYSEIGMKGERRRGKGHDGLYQGLSTATKDTYDALHMQALPPR

SEQ ID NO: 1617 - protein, 486 aa, Artificial Sequence
  source: /note="Description of Artificial Sequence: Synthetic Chimeric Antigen Receptor sequence"
MALPVTALLLPLALLLHAARPEVQLVQSGAEVKKPGESLRISCKGSGYTFTSYWMNWVRQMPGKGLEWMGRIDPYDSETHYNQKFKDHVTISVDKSISTAYLQWSSLKASDTAMYYCARGNWDDYWGQGTTVTVSSGGGGSGGGGSGGGGSGGGGSEVVLTQSPATLSLSPGERATLSCRASKSISKDLAWYQQKPGQAPRLLIYSGSTLQSGIPARFSGSGSGTDFTLTISSLEPEDFAVYYCQQHNKYPYTFGGGTKVEIKTTTPAPRPPTPAPTIASQPLSLRPEACRPAAGGAVHTRGLDFACDIYIWAPLAGTCGVLLLSLVITLYCKRGRKKLLYIFKQPFMRPVQTTQEEDGCSCRFPEEEEGGCELRVKFSRSADAPAYKQGQNQLYNELNLGRREEYDVLDKRRGRDPEMGGKPRRKNPQEGLYNELQKDKMAEAYSEIGMKGERRRGKGHDGLYQGLSTATKDTYDALHMQALPPR

SEQ ID NO: 1618 - protein, 486 aa, Artificial Sequence
  source: /note="Description of Artificial Sequence: Synthetic Chimeric Antigen Receptor sequence"
MALPVTALLLPLALLLHAARPEVVLTQSPATLSLSPGERATLSCRASKSISKDLAWYQQKPGQAPRLLIYSGSTLQSGIPARFSGSGSGTDFTLTISSLEPEDFAVYYCQQHNKYPYTFGGGTKVEIKGGGGSGGGGSGGGGSGGGGSEVQLVESGGGLVQPGGSLRLSCAASGYTFTSYWMNWVRQAPGKGLVWVSRIDPYDSETHYNQKFKDRFTISVDKAKSTAYLQMNSLRAEDTAVYYCARGNWDDYWGQGTTVTVSSTTTPAPRPPTPAPTIASQPLSLRPEACRPAAGGAVHTRGLDFACDIYIWAPLAGTCGVLLLSLVITLYCKRGRKKLLYIFKQPFMRPVQTTQEEDGCSCRFPEEEEGGCELRVKFSRSADAPAYKQGQNQLYNELNLGRREEYDVLDKRRGRDPEMGGKPRRKNPQEGLYNELQKDKMAEAYSEIGMKGERRRGKGHDGLYQGLSTATKDTYDALHMQALPPR

SEQ ID NO: 1619 - protein, 486 aa, Artificial Sequence
  source: /note="Description of Artificial Sequence: Synthetic Chimeric Antigen Receptor sequence"
MALPVTALLLPLALLLHAARPEVVLTQSPATLSLSPGERATLSCRASKSISKDLAWYQQKPGQAPRLLIYSGSTLQSGIPARFSGSGSGTDFTLTISSLEPEDFAVYYCQQHNKYPYTFGGGTKVEIKGGGGSGGGGSGGGGSGGGGSEVQLVQSGAEVKKPGESLRISCKGSGYTFTSYWMNWVRQMPGKGLEWMGRIDPYDSETHYNQKFKDHVTISVDKSISTAYLQWSSLKASDTAMYYCARGNWDDYWGQGTTVTVSSTTTPAPRPPTPAPTIASQPLSLRPEACRPAAGGAVHTRGLDFACDIYIWAPLAGTCGVLLLSLVITLYCKRGRKKLLYIFKQPFMRPVQTTQEEDGCSCRFPEEEEGGCELRVKFSRSADAPAYKQGQNQLYNELNLGRREEYDVLDKRRGRDPEMGGKPRRKNPQEGLYNELQKDKMAEAYSEIGMKGERRRGKGHDGLYQGLSTATKDTYDALHMQALPPR

SEQ ID NO: 1620 - protein, 486 aa, Artificial Sequence
  source: /note="Description of Artificial Sequence: Synthetic Chimeric Antigen Receptor sequence"
MALPVTALLLPLALLLHAARPEVVLTQSPATLSLSPGERATLSCRASKSISKDLAWYQQKPGQAPRLLIYSGSTLQSGIPARFSGSGSGTDFTLTISSLEPEDFAVYYCQQHNKYPYTFGGGTKVEIKGGGGSGGGGSGGGGSGGGGSQVQLVQSGAEVKKPGASVKVSCKASGYTFTSYWMNWVRQAPGQGLEWMGRIDPYDSETHYNQKFKDRVTMTVDKSTSTAYMELSSLRSEDTAVYYCARGNWDDYWGQGTTVTVSSTTTPAPRPPTPAPTIASQPLSLRPEACRPAAGGAVHTRGLDFACDIYIWAPLAGTCGVLLLSLVITLYCKRGRKKLLYIFKQPFMRPVQTTQEEDGCSCRFPEEEEGGCELRVKFSRSADAPAYKQGQNQLYNELNLGRREEYDVLDKRRGRDPEMGGKPRRKNPQEGLYNELQKDKMAEAYSEIGMKGERRRGKGHDGLYQGLSTATKDTYDALHMQALPPR

SEQ ID NO: 1621 - protein, 486 aa, Artificial Sequence
  source: /note="Description of Artificial Sequence: Synthetic Chimeric Antigen Receptor sequence"
MALPVTALLLPLALLLHAARPEVVLTQSPATLSLSPGERATLSCRASKSISKDLAWYQQKPGQAPRLLIYSGSTLQSGIPARFSGSGSGTDFTLTISSLEPEDFAVYYCQQHNKYPYTFGGGTKVEIKGGGGSGGGGSGGGGSGGGGSQVQLVQSGSELKKPGASVKVSCKASGYTFTSYWMNWVRQAPGQGLEWMGRIDPYDSETHYNQKFKDRFVFSVDKSVSTAYLQISSLKAEDTAVYYCARGNWDDYWGQGTTVTVSSTTTPAPRPPTPAPTIASQPLSLRPEACRPAAGGAVHTRGLDFACDIYIWAPLAGTCGVLLLSLVITLYCKRGRKKLLYIFKQPFMRPVQTTQEEDGCSCRFPEEEEGGCELRVKFSRSADAPAYKQGQNQLYNELNLGRREEYDVLDKRRGRDPEMGGKPRRKNPQEGLYNELQKDKMAEAYSEIGMKGERRRGKGHDGLYQGLSTATKDTYDALHMQALPPR

SEQ ID NO: 1622 - protein, 486 aa, Artificial Sequence
  source: /note="Description of Artificial Sequence: Synthetic Chimeric Antigen Receptor sequence"
MALPVTALLLPLALLLHAARPQVQLVQSGAEVKKPGASVKVSCKASGYTFTSYWMNWVRQAPGQGLEWMGRIDPYDSETHYNQKFKDRVTMTVDKSTSTAYMELSSLRSEDTAVYYCARGNWDDYWGQGTTVTVSSGGGGSGGGGSGGGGSGGGGSDVQLTQSPSFLSASVGDRVTITCRASKSISKDLAWYQQKPGKAPKLLIYSGSTLQSGVPSRFSGSGSGTEFTLTISSLQPEDFATYYCQQHNKYPYTFGGGTKVEIKTTTPAPRPPTPAPTIASQPLSLRPEACRPAAGGAVHTRGLDFACDIYIWAPLAGTCGVLLLSLVITLYCKRGRKKLLYIFKQPFMRPVQTTQEEDGCSCRFPEEEEGGCELRVKFSRSADAPAYKQGQNQLYNELNLGRREEYDVLDKRRGRDPEMGGKPRRKNPQEGLYNELQKDKMAEAYSEIGMKGERRRGKGHDGLYQGLSTATKDTYDALHMQALPPR

SEQ ID NO: 1623 - protein, 486 aa, Artificial Sequence
  source: /note="Description of Artificial Sequence: Synthetic Chimeric Antigen Receptor sequence"
MALPVTALLLPLALLLHAARPQVQLVQSGAEVKKPGASVKVSCKASGYTFTSYWMNWVRQAPGQGLEWMGRIDPYDSETHYNQKFKDRVTMTVDKSTSTAYMELSSLRSEDTAVYYCARGNWDDYWGQGTTVTVSSGGGGSGGGGSGGGGSGGGGSDVVMTQSPAFLSVTPGEKVTITCRASKSISKDLAWYQQKPDQAPKLLIYSGSTLQSGVPSRFSGSGSGTDFTFTISSLEAEDAATYYCQQHNKYPYTFGGGTKVEIKTTTPAPRPPTPAPTIASQPLSLRPEACRPAAGGAVHTRGLDFACDIYIWAPLAGTCGVLLLSLVITLYCKRGRKKLLYIFKQPFMRPVQTTQEEDGCSCRFPEEEEGGCELRVKFSRSADAPAYKQGQNQLYNELNLGRREEYDVLDKRRGRDPEMGGKPRRKNPQEGLYNELQKDKMAEAYSEIGMKGERRRGKGHDGLYQGLSTATKDTYDALHMQALPPR

SEQ ID NO: 1624 - protein, 486 aa, Artificial Sequence
  source: /note="Description of Artificial Sequence: Synthetic Chimeric Antigen Receptor sequence"
MALPVTALLLPLALLLHAARPQVQLVQSGAEVKKPGASVKVSCKASGYTFTSYWMNWVRQAPGQGLEWMGRIDPYDSETHYNQKFKDRVTMTVDKSTSTAYMELSSLRSEDTAVYYCARGNWDDYWGQGTTVTVSSGGGGSGGGGSGGGGSGGGGSDVVMTQSPDSLAVSLGERATINCRASKSISKDLAWYQQKPGQPPKLLIYSGSTLQSGVPDRFSGSGSGTDFTLTISSLQAEDVAVYYCQQHNKYPYTFGGGTKVEIKTTTPAPRPPTPAPTIASQPLSLRPEACRPAAGGAVHTRGLDFACDIYIWAPLAGTCGVLLLSLVITLYCKRGRKKLLYIFKQPFMRPVQTTQEEDGCSCRFPEEEEGGCELRVKFSRSADAPAYKQGQNQLYNELNLGRREEYDVLDKRRGRDPEMGGKPRRKNPQEGLYNELQKDKMAEAYSEIGMKGERRRGKGHDGLYQGLSTATKDTYDALHMQALPPR

SEQ ID NO: 1625 - protein, 486 aa, Artificial Sequence
  source: /note="Description of Artificial Sequence: Synthetic Chimeric Antigen Receptor sequence"
MALPVTALLLPLALLLHAARPQVQLVQSGAEVKKPGASVKVSCKASGYTFTSYWMNWVRQAPGQGLEWMGRIDPYDSETHYNQKFKDRVTMTVDKSTSTAYMELSSLRSEDTAVYYCARGNWDDYWGQGTTVTVSSGGGGSGGGGSGGGGSGGGGSEVVLTQSPATLSLSPGERATLSCRASKSISKDLAWYQQKPGQAPRLLIYSGSTLQSGIPARFSGSGSGTDFTLTISSLEPEDFAVYYCQQHNKYPYTFGGGTKVEIKTTTPAPRPPTPAPTIASQPLSLRPEACRPAAGGAVHTRGLDFACDIYIWAPLAGTCGVLLLSLVITLYCKRGRKKLLYIFKQPFMRPVQTTQEEDGCSCRFPEEEEGGCELRVKFSRSADAPAYKQGQNQLYNELNLGRREEYDVLDKRRGRDPEMGGKPRRKNPQEGLYNELQKDKMAEAYSEIGMKGERRRGKGHDGLYQGLSTATKDTYDALHMQALPPR

SEQ ID NO: 1626 - protein, 486 aa, Artificial Sequence
  source: /note="Description of Artificial Sequence: Synthetic Chimeric Antigen Receptor sequence"
MALPVTALLLPLALLLHAARPQVQLVQSGSELKKPGASVKVSCKASGYTFTSYWMNWVRQAPGQGLEWMGRIDPYDSETHYNQKFKDRFVFSVDKSVSTAYLQISSLKAEDTAVYYCARGNWDDYWGQGTTVTVSSGGGGSGGGGSGGGGSGGGGSDVQLTQSPSFLSASVGDRVTITCRASKSISKDLAWYQQKPGKAPKLLIYSGSTLQSGVPSRFSGSGSGTEFTLTISSLQPEDFATYYCQQHNKYPYTFGGGTKVEIKTTTPAPRPPTPAPTIASQPLSLRPEACRPAAGGAVHTRGLDFACDIYIWAPLAGTCGVLLLSLVITLYCKRGRKKLLYIFKQPFMRPVQTTQEEDGCSCRFPEEEEGGCELRVKFSRSADAPAYKQGQNQLYNELNLGRREEYDVLDKRRGRDPEMGGKPRRKNPQEGLYNELQKDKMAEAYSEIGMKGERRRGKGHDGLYQGLSTATKDTYDALHMQALPPR

SEQ ID NO: 1627 - protein, 486 aa, Artificial Sequence
  source: /note="Description of Artificial Sequence: Synthetic Chimeric Antigen Receptor sequence"
MALPVTALLLPLALLLHAARPQVQLVQSGSELKKPGASVKVSCKASGYTFTSYWMNWVRQAPGQGLEWMGRIDPYDSETHYNQKFKDRFVFSVDKSVSTAYLQISSLKAEDTAVYYCARGNWDDYWGQGTTVTVSSGGGGSGGGGSGGGGSGGGGSDVVMTQSPAFLSVTPGEKVTITCRASKSISKDLAWYQQKPDQAPKLLIYSGSTLQSGVPSRFSGSGSGTDFTFTISSLEAEDAATYYCQQHNKYPYTFGGGTKVEIKTTTPAPRPPTPAPTIASQPLSLRPEACRPAAGGAVHTRGLDFACDIYIWAPLAGTCGVLLLSLVITLYCKRGRKKLLYIFKQPFMRPVQTTQEEDGCSCRFPEEEEGGCELRVKFSRSADAPAYKQGQNQLYNELNLGRREEYDVLDKRRGRDPEMGGKPRRKNPQEGLYNELQKDKMAEAYSEIGMKGERRRGKGHDGLYQGLSTATKDTYDALHMQALPPR

SEQ ID NO: 1628 - protein, 486 aa, Artificial Sequence
  source: /note="Description of Artificial Sequence: Synthetic Chimeric Antigen Receptor sequence"
MALPVTALLLPLALLLHAARPQVQLVQSGSELKKPGASVKVSCKASGYTFTSYWMNWVRQAPGQGLEWMGRIDPYDSETHYNQKFKDRFVFSVDKSVSTAYLQISSLKAEDTAVYYCARGNWDDYWGQGTTVTVSSGGGGSGGGGSGGGGSGGGGSDVVMTQSPDSLAVSLGERATINCRASKSISKDLAWYQQKPGQPPKLLIYSGSTLQSGVPDRFSGSGSGTDFTLTISSLQAEDVAVYYCQQHNKYPYTFGGGTKVEIKTTTPAPRPPTPAPTIASQPLSLRPEACRPAAGGAVHTRGLDFACDIYIWAPLAGTCGVLLLSLVITLYCKRGRKKLLYIFKQPFMRPVQTTQEEDGCSCRFPEEEEGGCELRVKFSRSADAPAYKQGQNQLYNELNLGRREEYDVLDKRRGRDPEMGGKPRRKNPQEGLYNELQKDKMAEAYSEIGMKGERRRGKGHDGLYQGLSTATKDTYDALHMQALPPR

SEQ ID NO: 1629 - protein, 486 aa, Artificial Sequence
  source: /note="Description of Artificial Sequence: Synthetic Chimeric Antigen Receptor sequence"
MALPVTALLLPLALLLHAARPQVQLVQSGSELKKPGASVKVSCKASGYTFTSYWMNWVRQAPGQGLEWMGRIDPYDSETHYNQKFKDRFVFSVDKSVSTAYLQISSLKAEDTAVYYCARGNWDDYWGQGTTVTVSSGGGGSGGGGSGGGGSGGGGSEVVLTQSPATLSLSPGERATLSCRASKSISKDLAWYQQKPGQAPRLLIYSGSTLQSGIPARFSGSGSGTDFTLTISSLEPEDFAVYYCQQHNKYPYTFGGGTKVEIKTTTPAPRPPTPAPTIASQPLSLRPEACRPAAGGAVHTRGLDFACDIYIWAPLAGTCGVLLLSLVITLYCKRGRKKLLYIFKQPFMRPVQTTQEEDGCSCRFPEEEEGGCELRVKFSRSADAPAYKQGQNQLYNELNLGRREEYDVLDKRRGRDPEMGGKPRRKNPQEGLYNELQKDKMAEAYSEIGMKGERRRGKGHDGLYQGLSTATKDTYDALHMQALPPR

SEQ ID NO: 1630 - protein, 487 aa, Artificial Sequence
  source: /note="Description of Artificial Sequence: Synthetic Chimeric Antigen Receptor sequence"
MGWSWIFLFLVSGTGGVLSEVQLQQSGPELVKPGASVKMSCKASGYTFTDYYMKWVKQSHGKSLEWIGDIIPSNGATFYNQKFKGKATLTVDRSSSTAYMHLNSLTSEDSAVYYCTRSHLLRASWFAYWGQGTLVTVSAASGGGGSGGGGSGGGGSMESQTQVLMSLLFWVSGTCGDFVMTQSPSSLTVTAGEKVTMSCKSSQSLLNSGNQKNYLTWYLQKPGQPPKLLIYWASTRESGVPDRFTGSGSGTDFTLTISSVQAEDLAVYYCQNDYSYPYTFGGGTKLEIKRGLAVSTISSFFPPGYQIISFFLALTSTALLFLLFFLTLRFSVVKRGRKKLLYIFKQPFMRPVQTTQEEDGCSCRFPEEEEGGCELRVKFSRSADAPAYQQGQNQLYNELNLGRREEYDVLDKRRGRDPEMGGKPRRKNPQEGLYNELQKDKMAEAYSEIGMKGERRRGKGHDGLYQGLSTATKDTYDALHMQALPPR

SEQ ID NO: 1631 - protein, 495 aa, Artificial Sequence
  source: /note="Description of Artificial Sequence: Synthetic Chimeric Antigen Receptor sequence"
MALPVTALLLPLALLLHAARPQIQLVQSGPELKKPGETVKISCKASGYIFTNYGMNWVKQAPGKSFKWMGWINTYTGESTYSADFKGRFAFSLETSASTAYLHINDLKNEDTATYFCARSGGYDPMDYWGQGTSVTVSSGGGCPYSNPSLCGGGGSDIVLTQSPASLAVSLGQRATISCRASESVDNYGNTFMHWYQQKPGQPPKLLIYRASNLESGIPARFSGSGSRTDFTLTINPVEADDVATYYCQQSNEDPPTFGAGTKLELKRSDPTTTPAPRPPTPAPTIASQPLSLRPEACRPAAGGAVHTRGLDFACDIYIWAPLAGTCGVLLLSLVITLYCRRGRKKLLYIFKQPFMRPVQTTQEEDGCSCRFPEEEEGGCELRVKFSRSADAPAYQQGQNQLYNELNLGRREEYDVLDKRRGRDPEMGGKPRRKNPQEGLYNELQKDKMAEAYSEIGMKGERRRGKGHDGLYQGLSTATKDTYDALHMQALPPRE

SEQ ID NO: 1632 - protein, 499 aa, Artificial Sequence
  source: /note="Description of Artificial Sequence: Synthetic Chimeric Antigen Receptor sequence"
MALPVTALLLPLALLLHAARPEVKLVESGGGLVQPGGSLSLSCAASGFTFTDYYMSWVRQPPGKALEWLALIRSKADGYTTEYSASVKGRFTLSRDDSQSILYLQMNALRPEDSATYYCARDAAYYSYYSPEGAMDYWGQGTSVTVSSGGGGSGGGGSGGGGSMADYKDIVMTQSHKFMSTSVGDRVNITCKASQNVDSAVAWYQQKPGQSPKALIYSASYRYSGVPDRFTGRGSGTDFTLTISSVQAEDLAVYYCQQYYSTPWTFGGGTKLEIKRTTTPAPRPPTPAPTIASQPLSLRPEACRPAAGGAVHTRGLDFACDIYIWAPLAGTCGVLLLSLVITLYCKRGRKKLLYIFKQPFMRPVQTTQEEDGCSCRFPEEEEGGCELRVKFSRSADAPAYQQGQNQLYNELNLGRREEYDVLDKRRGRDPEMGGKPRRKNPQEGLYNELQKDKMAEAYSEIGMKGERRRGKGHDGLYQGLSTATKDTYDALHMQALPPR

SEQ ID NO: 1633 - protein, 499 aa, Artificial Sequence
  source: /note="Description of Artificial Sequence: Synthetic Chimeric Antigen Receptor sequence"
MALPVTALLLPLALLLHAARPEVKLVESGGGLVQPGRSLRLSCTASGFTFTDYYMSWVRQAPGKGLEWVGLIRSKADGYTTEYSASVKGRFTISRDDSKSILYLQMNSLKTEDTAVYYCARDAAYYSYYSPEGAMDYWGQGTLVTVSSGGGGSGGGGSGGGGSMADYKDIQMTQSPSSVSASVGDRVTITCRASQNVDSAVAWYQQKPGKAPKALIYSASYRYSGVPSRFSGRGSGTDFTLTISSLQPEDFATYYCQQYYSTPWTFGQGTKVEIKRTTTPAPRPPTPAPTIASQPLSLRPEACRPAAGGAVHTRGLDFACDIYIWAPLAGTCGVLLLSLVITLYCKRGRKKLLYIFKQPFMRPVQTTQEEDGCSCRFPEEEEGGCELRVKFSRSADAPAYQQGQNQLYNELNLGRREEYDVLDKRRGRDPEMGGKPRRKNPQEGLYNELQKDKMAEAYSEIGMKGERRRGKGHDGLYQGLSTATKDTYDALHMQALPPR

SEQ ID NO: 1634 - protein, 499 aa, Artificial Sequence
  source: /note="Description of Artificial Sequence: Synthetic Chimeric Antigen Receptor sequence"
MALPVTALLLPLALLLHAARPEVKLVESGGGLVQPGRSLRLSCTASGFTFTDYYMSWVRQAPGKGLEWVGLIRSKADGYTTEYSASVKGRFTISRDDSKSILYLQMNSLKTEDTAVYYCARDAAYYSYYSPEGAMDYWGQGTLVTVSSGGGGSGGGGSGGGGSMADYKDIQMTQSPSSVSASVGDRVTITCRASQNVDSAVAWYQQKPGKAPKALIYSASYRYSGVPSRFSGSGSGTDFTLTISSLQPEDFATYYCQQYYSTPWTFGQGTKVEIKRTTTPAPRPPTPAPTIASQPLSLRPEACRPAAGGAVHTRGLDFACDIYIWAPLAGTCGVLLLSLVITLYCKRGRKKLLYIFKQPFMRPVQTTQEEDGCSCRFPEEEEGGCELRVKFSRSADAPAYQQGQNQLYNELNLGRREEYDVLDKRRGRDPEMGGKPRRKNPQEGLYNELQKDKMAEAYSEIGMKGERRRGKGHDGLYQGLSTATKDTYDALHMQALPPR

SEQ ID NO: 1635 - protein, 499 aa, Artificial Sequence
  source: /note="Description of Artificial Sequence: Synthetic Chimeric Antigen Receptor sequence"
MALPVTALLLPLALLLHAARPEVKLVESGGGLVQPGRSLRLSCTASGFTFTDYYMSWVRQAPGKGLEWVGLIRSKADGYTTEYSASVKGRFTISRDDSKSILYLQMNSLKTEDTAVYYCARDAAYYSYYSPEGAMDYWGQGTLVTVSSGGGGSGGGGSGGGGSMADYKDIQMTQSPSSVSASVGDRVTITCRASQNVDSAVAWYQQKPGKAPKLLIYSASYGQSGVPSRFSGSGSGTDFTLTISSLQPEDFATYYCQQYYSTPWTFGQGTKVEIKRTTTPAPRPPTPAPTIASQPLSLRPEACRPAAGGAVHTRGLDFACDIYIWAPLAGTCGVLLLSLVITLYCKRGRKKLLYIFKQPFMRPVQTTQEEDGCSCRFPEEEEGGCELRVKFSRSADAPAYQQGQNQLYNELNLGRREEYDVLDKRRGRDPEMGGKPRRKNPQEGLYNELQKDKMAEAYSEIGMKGERRRGKGHDGLYQGLSTATKDTYDALHMQALPPR

SEQ ID NO: 1636 - protein, 499 aa, Artificial Sequence
  source: /note="Description of Artificial Sequence: Synthetic Chimeric Antigen Receptor sequence"
MALPVTALLLPLALLLHAARPEVKLVESGGGLVQPGRSLRLSCTASGFTFTDYYMSWVRQAPGKGLEWVGLIRSKADGYTTEYSASVKGRFTISRDDSKSILYLQMNSLKTEDTAVYYCARDAAYYSYYSPEGAMDYWGQGTLVTVSSGGGGSGGGGSGGGGSMADYKDIQMTQSPSSVSASVGDRVTITCRASQNVDSAVAWYQQKPGKAPKLLIYSASYRQSGVPSRFSGSGSGTDFTLTISSLQPEDFATYYCQQYYSTPWTFGQGTKVEIKRTTTPAPRPPTPAPTIASQPLSLRPEACRPAAGGAVHTRGLDFACDIYIWAPLAGTCGVLLLSLVITLYCKRGRKKLLYIFKQPFMRPVQTTQEEDGCSCRFPEEEEGGCELRVKFSRSADAPAYQQGQNQLYNELNLGRREEYDVLDKRRGRDPEMGGKPRRKNPQEGLYNELQKDKMAEAYSEIGMKGERRRGKGHDGLYQGLSTATKDTYDALHMQALPPR

SEQ ID NO: 1637 - protein, 499 aa, Artificial Sequence
  source: /note="Description of Artificial Sequence: Synthetic Chimeric Antigen Receptor sequence"
MALPVTALLLPLALLLHAARPEVKLVESGGGLVQPGRSLRLSCTASGFTFTDYYMSWVRQAPGKGLEWVGLIRSKADGYTTEYSASVKGRFTISRDDSKSILYLQMNSLKTEDTAVYYCARDAAYYSYYSPEGAMDYWGQGTLVTVSSGGGGSGGGGSGGGGSMADYKDIQMTQSPSSVSASVGDRVTITCRASQNVDSAVAWYQQKPGKAPKLLIYSASYRYSGVPSRFSGSGSGTDFTLTISSLQPEDFATYYCQQYYSTPWTFGQGTKVEIKRTTTPAPRPPTPAPTIASQPLSLRPEACRPAAGGAVHTRGLDFACDIYIWAPLAGTCGVLLLSLVITLYCKRGRKKLLYIFKQPFMRPVQTTQEEDGCSCRFPEEEEGGCELRVKFSRSADAPAYQQGQNQLYNELNLGRREEYDVLDKRRGRDPEMGGKPRRKNPQEGLYNELQKDKMAEAYSEIGMKGERRRGKGHDGLYQGLSTATKDTYDALHMQALPPR

SEQ ID NO: 1638 - protein, 499 aa, Artificial Sequence
  source: /note="Description of Artificial Sequence: Synthetic Chimeric Antigen Receptor sequence"
MALPVTALLLPLALLLHAARPEVKLVESGGGLVQPGRSLRLSCTASGFTFTDYYMSWVRQAPGKGLEWVGLIRSKADGYTTEYSASVKGRFTISRDDSKSILYLQMNSLKTEDTAVYYCARDAAYYSYYSPEGAMDYWGQGTLVTVSSGGGGSGGGGSGGGGSMADYKDIVMTQSPSSVSASVGDRVTITCRASQNVDSAVAWYQQKPGKAPKALIYSASYRYSGVPSRFSGRGSGTDFTLTISSLQPEDFATYYCQQYYSTPWTFGQGTKVEIKRTTTPAPRPPTPAPTIASQPLSLRPEACRPAAGGAVHTRGLDFACDIYIWAPLAGTCGVLLLSLVITLYCKRGRKKLLYIFKQPFMRPVQTTQEEDGCSCRFPEEEEGGCELRVKFSRSADAPAYQQGQNQLYNELNLGRREEYDVLDKRRGRDPEMGGKPRRKNPQEGLYNELQKDKMAEAYSEIGMKGERRRGKGHDGLYQGLSTATKDTYDALHMQALPPR

SEQ ID NO: 1639 - protein, 499 aa, Artificial Sequence
  source: /note="Description of Artificial Sequence: Synthetic Chimeric Antigen Receptor sequence"
MALPVTALLLPLALLLHAARPEVQLVESGGGLVQPGRSLRLSCTASGFTFTDYYMSWVRQAPGKGLEWVGFIRSKADGYTTEYAASVKGRFTISRDDSKSIAYLQMNSLKTEDTAVYYCARDAAYYSYYSPEGAMDYWGQGTLVTVSSGGGGSGGGGSGGGGSMADYKDIQMTQSPSSVSASVGDRVTITCRASQNVDSAVAWYQQKPGKAPKALIYSASYRYSGVPSRFSGRGSGTDFTLTISSLQPEDFATYYCQQYYSTPWTFGQGTKVEIKRTTTPAPRPPTPAPTIASQPLSLRPEACRPAAGGAVHTRGLDFACDIYIWAPLAGTCGVLLLSLVITLYCKRGRKKLLYIFKQPFMRPVQTTQEEDGCSCRFPEEEEGGCELRVKFSRSADAPAYQQGQNQLYNELNLGRREEYDVLDKRRGRDPEMGGKPRRKNPQEGLYNELQKDKMAEAYSEIGMKGERRRGKGHDGLYQGLSTATKDTYDALHMQALPPR

SEQ ID NO: 1640 - protein, 499 aa, Artificial Sequence
  source: /note="Description of Artificial Sequence: Synthetic Chimeric Antigen Receptor sequence"
MALPVTALLLPLALLLHAARPEVQLVESGGGLVQPGRSLRLSCTASGFTFTDYYMSWVRQAPGKGLEWVGFIRSKADGYTTEYAASVKGRFTISRDDSKSIAYLQMNSLKTEDTAVYYCARDAAYYSYYSPEGAMDYWGQGTLVTVSSGGGGSGGGGSGGGGSMADYKDIQMTQSPSSVSASVGDRVTITCRASQNVDSAVAWYQQKPGKAPKALIYSASYRYSGVPSRFSGSGSGTDFTLTISSLQPEDFATYYCQQYYSTPWTFGQGTKVEIKRTTTPAPRPPTPAPTIASQPLSLRPEACRPAAGGAVHTRGLDFACDIYIWAPLAGTCGVLLLSLVITLYCKRGRKKLLYIFKQPFMRPVQTTQEEDGCSCRFPEEEEGGCELRVKFSRSADAPAYQQGQNQLYNELNLGRREEYDVLDKRRGRDPEMGGKPRRKNPQEGLYNELQKDKMAEAYSEIGMKGERRRGKGHDGLYQGLSTATKDTYDALHMQALPPR

SEQ ID NO: 1641 - protein, 499 aa, Artificial Sequence
  source: /note="Description of Artificial Sequence: Synthetic Chimeric Antigen Receptor sequence"
MALPVTALLLPLALLLHAARPEVQLVESGGGLVQPGRSLRLSCTASGFTFTDYYMSWVRQAPGKGLEWVGFIRSKADGYTTEYAASVKGRFTISRDDSKSIAYLQMNSLKTEDTAVYYCARDAAYYSYYSPEGAMDYWGQGTLVTVSSGGGGSGGGGSGGGGSMADYKDIQMTQSPSSVSASVGDRVTITCRASQNVDSAVAWYQQKPGKAPKLLIYSASYGQSGVPSRFSGSGSGTDFTLTISSLQPEDFATYYCQQYYSTPWTFGQGTKVEIKRTTTPAPRPPTPAPTIASQPLSLRPEACRPAAGGAVHTRGLDFACDIYIWAPLAGTCGVLLLSLVITLYCKRGRKKLLYIFKQPFMRPVQTTQEEDGCSCRFPEEEEGGCELRVKFSRSADAPAYQQGQNQLYNELNLGRREEYDVLDKRRGRDPEMGGKPRRKNPQEGLYNELQKDKMAEAYSEIGMKGERRRGKGHDGLYQGLSTATKDTYDALHMQALPPR

SEQ ID NO: 1642 - protein, 499 aa, Artificial Sequence
  source: /note="Description of Artificial Sequence: Synthetic Chimeric Antigen Receptor sequence"
MALPVTALLLPLALLLHAARPEVQLVESGGGLVQPGRSLRLSCTASGFTFTDYYMSWVRQAPGKGLEWVGFIRSKADGYTTEYAASVKGRFTISRDDSKSIAYLQMNSLKTEDTAVYYCARDAAYYSYYSPEGAMDYWGQGTLVTVSSGGGGSGGGGSGGGGSMADYKDIQMTQSPSSVSASVGDRVTITCRASQNVDSAVAWYQQKPGKAPKLLIYSASYRQSGVPSRFSGSGSGTDFTLTISSLQPEDFATYYCQQYYSTPWTFGQGTKVEIKRTTTPAPRPPTPAPTIASQPLSLRPEACRPAAGGAVHTRGLDFACDIYIWAPLAGTCGVLLLSLVITLYCKRGRKKLLYIFKQPFMRPVQTTQEEDGCSCRFPEEEEGGCELRVKFSRSADAPAYQQGQNQLYNELNLGRREEYDVLDKRRGRDPEMGGKPRRKNPQEGLYNELQKDKMAEAYSEIGMKGERRRGKGHDGLYQGLSTATKDTYDALHMQALPPR

SEQ ID NO: 1643 - protein, 499 aa, Artificial Sequence
  source: /note="Description of Artificial Sequence: Synthetic Chimeric Antigen Receptor sequence"
MALPVTALLLPLALLLHAARPEVQLVESGGGLVQPGRSLRLSCTASGFTFTDYYMSWVRQAPGKGLEWVGFIRSKADGYTTEYAASVKGRFTISRDDSKSIAYLQMNSLKTEDTAVYYCARDAAYYSYYSPEGAMDYWGQGTLVTVSSGGGGSGGGGSGGGGSMADYKDIQMTQSPSSVSASVGDRVTITCRASQNVDSAVAWYQQKPGKAPKLLIYSASYRYSGVPSRFSGSGSGTDFTLTISSLQPEDFATYYCQQYYSTPWTFGQGTKVEIKRTTTPAPRPPTPAPTIASQPLSLRPEACRPAAGGAVHTRGLDFACDIYIWAPLAGTCGVLLLSLVITLYCKRGRKKLLYIFKQPFMRPVQTTQEEDGCSCRFPEEEEGGCELRVKFSRSADAPAYQQGQNQLYNELNLGRREEYDVLDKRRGRDPEMGGKPRRKNPQEGLYNELQKDKMAEAYSEIGMKGERRRGKGHDGLYQGLSTATKDTYDALHMQALPPR

SEQ ID NO: 1644 - protein, 499 aa, Artificial Sequence
  source: /note="Description of Artificial Sequence: Synthetic Chimeric Antigen Receptor sequence"
MALPVTALLLPLALLLHAARPEVQLVESGGGLVQPGRSLRLSCTASGFTFTDYYMSWVRQAPGKGLEWVGFIRSKADGYTTEYAASVKGRFTISRDDSKSIAYLQMNSLKTEDTAVYYCARDAAYYSYYSPEGAMDYWGQGTLVTVSSGGGGSGGGGSGGGGSMADYKDIVMTQSPSSVSASVGDRVTITCRASQNVDSAVAWYQQKPGKAPKALIYSASYRYSGVPSRFSGRGSGTDFTLTISSLQPEDFATYYCQQYYSTPWTFGQGTKVEIKRTTTPAPRPPTPAPTIASQPLSLRPEACRPAAGGAVHTRGLDFACDIYIWAPLAGTCGVLLLSLVITLYCKRGRKKLLYIFKQPFMRPVQTTQEEDGCSCRFPEEEEGGCELRVKFSRSADAPAYQQGQNQLYNELNLGRREEYDVLDKRRGRDPEMGGKPRRKNPQEGLYNELQKDKMAEAYSEIGMKGERRRGKGHDGLYQGLSTATKDTYDALHMQALPPR

SEQ ID NO: 1645 - protein, 499 aa, Artificial Sequence
  source: /note="Description of Artificial Sequence: Synthetic Chimeric Antigen Receptor sequence"
MALPVTALLLPLALLLHAARPEVQLVESGGGLVQPGRSLRLSCTASGFTFTDYYMSWVRQAPGKGLEWVGFIRSKADGYTTEYAASVKGRFTISRDDSKSIAYLQMNSLKTEDTAVYYCTRDAAYYSYYSPEGAMDYWGQGTLVTVSSGGGGSGGGGSGGGGSMADYKDIQMTQSPSSVSASVGDRVTITCRASQNVDSAVAWYQQKPGKAPKALIYSASYRYSGVPSRFSGRGSGTDFTLTISSLQPEDFATYYCQQYYSTPWTFGQGTKVEIKRTTTPAPRPPTPAPTIASQPLSLRPEACRPAAGGAVHTRGLDFACDIYIWAPLAGTCGVLLLSLVITLYCKRGRKKLLYIFKQPFMRPVQTTQEEDGCSCRFPEEEEGGCELRVKFSRSADAPAYQQGQNQLYNELNLGRREEYDVLDKRRGRDPEMGGKPRRKNPQEGLYNELQKDKMAEAYSEIGMKGERRRGKGHDGLYQGLSTATKDTYDALHMQALPPR

SEQ ID NO: 1646 - protein, 499 aa, Artificial Sequence
  source: /note="Description of Artificial Sequence: Synthetic Chimeric Antigen Receptor sequence"
MALPVTALLLPLALLLHAARPEVQLVESGGGLVQPGRSLRLSCTASGFTFTDYYMSWVRQAPGKGLEWVGFIRSKADGYTTEYAASVKGRFTISRDDSKSIAYLQMNSLKTEDTAVYYCTRDAAYYSYYSPEGAMDYWGQGTLVTVSSGGGGSGGGGSGGGGSMADYKDIQMTQSPSSVSASVGDRVTITCRASQNVDSAVAWYQQKPGKAPKALIYSASYRYSGVPSRFSGSGSGTDFTLTISSLQPEDFATYYCQQYYSTPWTFGQGTKVEIKRTTTPAPRPPTPAPTIASQPLSLRPEACRPAAGGAVHTRGLDFACDIYIWAPLAGTCGVLLLSLVITLYCKRGRKKLLYIFKQPFMRPVQTTQEEDGCSCRFPEEEEGGCELRVKFSRSADAPAYQQGQNQLYNELNLGRREEYDVLDKRRGRDPEMGGKPRRKNPQEGLYNELQKDKMAEAYSEIGMKGERRRGKGHDGLYQGLSTATKDTYDALHMQALPPR

SEQ ID NO: 1647 - protein, 499 aa, Artificial Sequence
  source: /note="Description of Artificial Sequence: Synthetic Chimeric Antigen Receptor sequence"
MALPVTALLLPLALLLHAARPEVQLVESGGGLVQPGRSLRLSCTASGFTFTDYYMSWVRQAPGKGLEWVGFIRSKADGYTTEYAASVKGRFTISRDDSKSIAYLQMNSLKTEDTAVYYCTRDAAYYSYYSPEGAMDYWGQGTLVTVSSGGGGSGGGGSGGGGSMADYKDIQMTQSPSSVSASVGDRVTITCRASQNVDSAVAWYQQKPGKAPKLLIYSASYGQSGVPSRFSGSGSGTDFTLTISSLQPEDFATYYCQQYYSTPWTFGQGTKVEIKRTTTPAPRPPTPAPTIASQPLSLRPEACRPAAGGAVHTRGLDFACDIYIWAPLAGTCGVLLLSLVITLYCKRGRKKLLYIFKQPFMRPVQTTQEEDGCSCRFPEEEEGGCELRVKFSRSADAPAYQQGQNQLYNELNLGRREEYDVLDKRRGRDPEMGGKPRRKNPQEGLYNELQKDKMAEAYSEIGMKGERRRGKGHDGLYQGLSTATKDTYDALHMQALPPR

SEQ ID NO: 1648 - protein, 499 aa, Artificial Sequence
  source: /note="Description of Artificial Sequence: Synthetic Chimeric Antigen Receptor sequence"
MALPVTALLLPLALLLHAARPEVQLVESGGGLVQPGRSLRLSCTASGFTFTDYYMSWVRQAPGKGLEWVGFIRSKADGYTTEYAASVKGRFTISRDDSKSIAYLQMNSLKTEDTAVYYCTRDAAYYSYYSPEGAMDYWGQGTLVTVSSGGGGSGGGGSGGGGSMADYKDIQMTQSPSSVSASVGDRVTITCRASQNVDSAVAWYQQKPGKAPKLLIYSASYRQSGVPSRFSGSGSGTDFTLTISSLQPEDFATYYCQQYYSTPWTFGQGTKVEIKRTTTPAPRPPTPAPTIASQPLSLRPEACRPAAGGAVHTRGLDFACDIYIWAPLAGTCGVLLLSLVITLYCKRGRKKLLYIFKQPFMRPVQTTQEEDGCSCRFPEEEEGGCELRVKFSRSADAPAYQQGQNQLYNELNLGRREEYDVLDKRRGRDPEMGGKPRRKNPQEGLYNELQKDKMAEAYSEIGMKGERRRGKGHDGLYQGLSTATKDTYDALHMQALPPR

SEQ ID NO: 1649 - protein, 499 aa, Artificial Sequence
  source: /note="Description of Artificial Sequence: Synthetic Chimeric Antigen Receptor sequence"
MALPVTALLLPLALLLHAARPEVQLVESGGGLVQPGRSLRLSCTASGFTFTDYYMSWVRQAPGKGLEWVGFIRSKADGYTTEYAASVKGRFTISRDDSKSIAYLQMNSLKTEDTAVYYCTRDAAYYSYYSPEGAMDYWGQGTLVTVSSGGGGSGGGGSGGGGSMADYKDIQMTQSPSSVSASVGDRVTITCRASQNVDSAVAWYQQKPGKAPKLLIYSASYRYSGVPSRFSGSGSGTDFTLTISSLQPEDFATYYCQQYYSTPWTFGQGTKVEIKRTTTPAPRPPTPAPTIASQPLSLRPEACRPAAGGAVHTRGLDFACDIYIWAPLAGTCGVLLLSLVITLYCKRGRKKLLYIFKQPFMRPVQTTQEEDGCSCRFPEEEEGGCELRVKFSRSADAPAYQQGQNQLYNELNLGRREEYDVLDKRRGRDPEMGGKPRRKNPQEGLYNELQKDKMAEAYSEIGMKGERRRGKGHDGLYQGLSTATKDTYDALHMQALPPR

SEQ ID NO: 1650 - protein, 499 aa, Artificial Sequence
  source: /note="Description of Artificial Sequence: Synthetic Chimeric Antigen Receptor sequence"
MALPVTALLLPLALLLHAARPEVQLVESGGGLVQPGRSLRLSCTASGFTFTDYYMSWVRQAPGKGLEWVGFIRSKADGYTTEYAASVKGRFTISRDDSKSIAYLQMNSLKTEDTAVYYCTRDAAYYSYYSPEGAMDYWGQGTLVTVSSGGGGSGGGGSGGGGSMADYKDIVMTQSPSSVSASVGDRVTITCRASQNVDSAVAWYQQKPGKAPKALIYSASYRYSGVPSRFSGRGSGTDFTLTISSLQPEDFATYYCQQYYSTPWTFGQGTKVEIKRTTTPAPRPPTPAPTIASQPLSLRPEACRPAAGGAVHTRGLDFACDIYIWAPLAGTCGVLLLSLVITLYCKRGRKKLLYIFKQPFMRPVQTTQEEDGCSCRFPEEEEGGCELRVKFSRSADAPAYQQGQNQLYNELNLGRREEYDVLDKRRGRDPEMGGKPRRKNPQEGLYNELQKDKMAEAYSEIGMKGERRRGKGHDGLYQGLSTATKDTYDALHMQALPPR

SEQ ID NO: 1651 - protein, 499 aa, Artificial Sequence
  source: /note="Description of Artificial Sequence: Synthetic Chimeric Antigen Receptor sequence"
MALPVTALLLPLALLLHAARPEVQLVESGGGLVQPGRSLRLSCTASGFTFTDYYMSWVRQAPGKGLEWVGFIRSKADGYTTEYSASVKGRFTISRDDSKSIAYLQMNSLKTEDTAVYYCARDAAYYSYYSPEGAMDYWGQGTLVTVSSGGGGSGGGGSGGGGSMADYKDIQMTQSPSSVSASVGDRVTITCRASQNVDSAVAWYQQKPGKAPKALIYSASYRYSGVPSRFSGRGSGTDFTLTISSLQPEDFATYYCQQYYSTPWTFGQGTKVEIKRTTTPAPRPPTPAPTIASQPLSLRPEACRPAAGGAVHTRGLDFACDIYIWAPLAGTCGVLLLSLVITLYCKRGRKKLLYIFKQPFMRPVQTTQEEDGCSCRFPEEEEGGCELRVKFSRSADAPAYQQGQNQLYNELNLGRREEYDVLDKRRGRDPEMGGKPRRKNPQEGLYNELQKDKMAEAYSEIGMKGERRRGKGHDGLYQGLSTATKDTYDALHMQALPPR

SEQ ID NO: 1652 - protein, 499 aa, Artificial Sequence
  source: /note="Description of Artificial Sequence: Synthetic Chimeric Antigen Receptor sequence"
MALPVTALLLPLALLLHAARPEVQLVESGGGLVQPGRSLRLSCTASGFTFTDYYMSWVRQAPGKGLEWVGFIRSKADGYTTEYSASVKGRFTISRDDSKSIAYLQMNSLKTEDTAVYYCARDAAYYSYYSPEGAMDYWGQGTLVTVSSGGGGSGGGGSGGGGSMADYKDIQMTQSPSSVSASVGDRVTITCRASQNVDSAVAWYQQKPGKAPKALIYSASYRYSGVPSRFSGSGSGTDFTLTISSLQPEDFATYYCQQYYSTPWTFGQGTKVEIKRTTTPAPRPPTPAPTIASQPLSLRPEACRPAAGGAVHTRGLDFACDIYIWAPLAGTCGVLLLSLVITLYCKRGRKKLLYIFKQPFMRPVQTTQEEDGCSCRFPEEEEGGCELRVKFSRSADAPAYQQGQNQLYNELNLGRREEYDVLDKRRGRDPEMGGKPRRKNPQEGLYNELQKDKMAEAYSEIGMKGERRRGKGHDGLYQGLSTATKDTYDALHMQALPPR

SEQ ID NO: 1653 - protein, 499 aa, Artificial Sequence
  source: /note="Description of Artificial Sequence: Synthetic Chimeric Antigen Receptor sequence"
MALPVTALLLPLALLLHAARPEVQLVESGGGLVQPGRSLRLSCTASGFTFTDYYMSWVRQAPGKGLEWVGFIRSKADGYTTEYSASVKGRFTISRDDSKSIAYLQMNSLKTEDTAVYYCARDAAYYSYYSPEGAMDYWGQGTLVTVSSGGGGSGGGGSGGGGSMADYKDIQMTQSPSSVSASVGDRVTITCRASQNVDSAVAWYQQKPGKAPKLLIYSASYGQSGVPSRFSGSGSGTDFTLTISSLQPEDFATYYCQQYYSTPWTFGQGTKVEIKRTTTPAPRPPTPAPTIASQPLSLRPEACRPAAGGAVHTRGLDFACDIYIWAPLAGTCGVLLLSLVITLYCKRGRKKLLYIFKQPFMRPVQTTQEEDGCSCRFPEEEEGGCELRVKFSRSADAPAYQQGQNQLYNELNLGRREEYDVLDKRRGRDPEMGGKPRRKNPQEGLYNELQKDKMAEAYSEIGMKGERRRGKGHDGLYQGLSTATKDTYDALHMQALPPR

SEQ ID NO: 1654 - protein, 499 aa, Artificial Sequence
  source: /note="Description of Artificial Sequence: Synthetic Chimeric Antigen Receptor sequence"
MALPVTALLLPLALLLHAARPEVQLVESGGGLVQPGRSLRLSCTASGFTFTDYYMSWVRQAPGKGLEWVGFIRSKADGYTTEYSASVKGRFTISRDDSKSIAYLQMNSLKTEDTAVYYCARDAAYYSYYSPEGAMDYWGQGTLVTVSSGGGGSGGGGSGGGGSMADYKDIQMTQSPSSVSASVGDRVTITCRASQNVDSAVAWYQQKPGKAPKLLIYSASYRQSGVPSRFSGSGSGTDFTLTISSLQPEDFATYYCQQYYSTPWTFGQGTKVEIKRTTTPAPRPPTPAPTIASQPLSLRPEACRPAAGGAVHTRGLDFACDIYIWAPLAGTCGVLLLSLVITLYCKRGRKKLLYIFKQPFMRPVQTTQEEDGCSCRFPEEEEGGCELRVKFSRSADAPAYQQGQNQLYNELNLGRREEYDVLDKRRGRDPEMGGKPRRKNPQEGLYNELQKDKMAEAYSEIGMKGERRRGKGHDGLYQGLSTATKDTYDALHMQALPPR

SEQ ID NO: 1655 - protein, 499 aa, Artificial Sequence
  source: /note="Description of Artificial Sequence: Synthetic Chimeric Antigen Receptor sequence"
MALPVTALLLPLALLLHAARPEVQLVESGGGLVQPGRSLRLSCTASGFTFTDYYMSWVRQAPGKGLEWVGFIRSKADGYTTEYSASVKGRFTISRDDSKSIAYLQMNSLKTEDTAVYYCARDAAYYSYYSPEGAMDYWGQGTLVTVSSGGGGSGGGGSGGGGSMADYKDIQMTQSPSSVSASVGDRVTITCRASQNVDSAVAWYQQKPGKAPKLLIYSASYRYSGVPSRFSGSGSGTDFTLTISSLQPEDFATYYCQQYYSTPWTFGQGTKVEIKRTTTPAPRPPTPAPTIASQPLSLRPEACRPAAGGAVHTRGLDFACDIYIWAPLAGTCGVLLLSLVITLYCKRGRKKLLYIFKQPFMRPVQTTQEEDGCSCRFPEEEEGGCELRVKFSRSADAPAYQQGQNQLYNELNLGRREEYDVLDKRRGRDPEMGGKPRRKNPQEGLYNELQKDKMAEAYSEIGMKGERRRGKGHDGLYQGLSTATKDTYDALHMQALPPR

SEQ ID NO: 1656 - protein, 499 aa, Artificial Sequence
  source: /note="Description of Artificial Sequence: Synthetic Chimeric Antigen Receptor sequence"
MALPVTALLLPLALLLHAARPEVQLVESGGGLVQPGRSLRLSCTASGFTFTDYYMSWVRQAPGKGLEWVGFIRSKADGYTTEYSASVKGRFTISRDDSKSIAYLQMNSLKTEDTAVYYCARDAAYYSYYSPEGAMDYWGQGTLVTVSSGGGGSGGGGSGGGGSMADYKDIVMTQSPSSVSASVGDRVTITCRASQNVDSAVAWYQQKPGKAPKALIYSASYRYSGVPSRFSGRGSGTDFTLTISSLQPEDFATYYCQQYYSTPWTFGQGTKVEIKRTTTPAPRPPTPAPTIASQPLSLRPEACRPAAGGAVHTRGLDFACDIYIWAPLAGTCGVLLLSLVITLYCKRGRKKLLYIFKQPFMRPVQTTQEEDGCSCRFPEEEEGGCELRVKFSRSADAPAYQQGQNQLYNELNLGRREEYDVLDKRRGRDPEMGGKPRRKNPQEGLYNELQKDKMAEAYSEIGMKGERRRGKGHDGLYQGLSTATKDTYDALHMQALPPR

SEQ ID NO: 1657 - protein, 499 aa, Artificial Sequence
  source: /note="Description of Artificial Sequence: Synthetic Chimeric Antigen Receptor sequence"
MALPVTALLLPLALLLHAARPEVQLVESGGGLVQPGRSLRLSCTASGFTFTDYYMSWVRQAPGKGLEWVGLIRSKADGYTTEYAASVKGRFTISRDDSKSIAYLQMNSLKTEDTAVYYCARDAAYYSYYSPEGAMDYWGQGTLVTVSSGGGGSGGGGSGGGGSMADYKDIQMTQSPSSVSASVGDRVTITCRASQNVDSAVAWYQQKPGKAPKALIYSASYRYSGVPSRFSGRGSGTDFTLTISSLQPEDFATYYCQQYYSTPWTFGQGTKVEIKRTTTPAPRPPTPAPTIASQPLSLRPEACRPAAGGAVHTRGLDFACDIYIWAPLAGTCGVLLLSLVITLYCKRGRKKLLYIFKQPFMRPVQTTQEEDGCSCRFPEEEEGGCELRVKFSRSADAPAYQQGQNQLYNELNLGRREEYDVLDKRRGRDPEMGGKPRRKNPQEGLYNELQKDKMAEAYSEIGMKGERRRGKGHDGLYQGLSTATKDTYDALHMQALPPR

SEQ ID NO: 1658 - protein, 499 aa, Artificial Sequence
  source: /note="Description of Artificial Sequence: Synthetic Chimeric Antigen Receptor sequence"
MALPVTALLLPLALLLHAARPEVQLVESGGGLVQPGRSLRLSCTASGFTFTDYYMSWVRQAPGKGLEWVGLIRSKADGYTTEYAASVKGRFTISRDDSKSIAYLQMNSLKTEDTAVYYCARDAAYYSYYSPEGAMDYWGQGTLVTVSSGGGGSGGGGSGGGGSMADYKDIQMTQSPSSVSASVGDRVTITCRASQNVDSAVAWYQQKPGKAPKALIYSASYRYSGVPSRFSGSGSGTDFTLTISSLQPEDFATYYCQQYYSTPWTFGQGTKVEIKRTTTPAPRPPTPAPTIASQPLSLRPEACRPAAGGAVHTRGLDFACDIYIWAPLAGTCGVLLLSLVITLYCKRGRKKLLYIFKQPFMRPVQTTQEEDGCSCRFPEEEEGGCELRVKFSRSADAPAYQQGQNQLYNELNLGRREEYDVLDKRRGRDPEMGGKPRRKNPQEGLYNELQKDKMAEAYSEIGMKGERRRGKGHDGLYQGLSTATKDTYDALHMQALPPR

SEQ ID NO: 1659 - protein, 499 aa, Artificial Sequence
  source: /note="Description of Artificial Sequence: Synthetic Chimeric Antigen Receptor sequence"
MALPVTALLLPLALLLHAARPEVQLVESGGGLVQPGRSLRLSCTASGFTFTDYYMSWVRQAPGKGLEWVGLIRSKADGYTTEYAASVKGRFTISRDDSKSIAYLQMNSLKTEDTAVYYCARDAAYYSYYSPEGAMDYWGQGTLVTVSSGGGGSGGGGSGGGGSMADYKDIQMTQSPSSVSASVGDRVTITCRASQNVDSAVAWYQQKPGKAPKLLIYSASYGQSGVPSRFSGSGSGTDFTLTISSLQPEDFATYYCQQYYSTPWTFGQGTKVEIKRTTTPAPRPPTPAPTIASQPLSLRPEACRPAAGGAVHTRGLDFACDIYIWAPLAGTCGVLLLSLVITLYCKRGRKKLLYIFKQPFMRPVQTTQEEDGCSCRFPEEEEGGCELRVKFSRSADAPAYQQGQNQLYNELNLGRREEYDVLDKRRGRDPEMGGKPRRKNPQEGLYNELQKDKMAEAYSEIGMKGERRRGKGHDGLYQGLSTATKDTYDALHMQALPPR

SEQ ID NO: 1660 - protein, 499 aa, Artificial Sequence
  source: /note="Description of Artificial Sequence: Synthetic Chimeric Antigen Receptor sequence"
MALPVTALLLPLALLLHAARPEVQLVESGGGLVQPGRSLRLSCTASGFTFTDYYMSWVRQAPGKGLEWVGLIRSKADGYTTEYAASVKGRFTISRDDSKSIAYLQMNSLKTEDTAVYYCARDAAYYSYYSPEGAMDYWGQGTLVTVSSGGGGSGGGGSGGGGSMADYKDIQMTQSPSSVSASVGDRVTITCRASQNVDSAVAWYQQKPGKAPKLLIYSASYRQSGVPSRFSGSGSGTDFTLTISSLQPEDFATYYCQQYYSTPWTFGQGTKVEIKRTTTPAPRPPTPAPTIASQPLSLRPEACRPAAGGAVHTRGLDFACDIYIWAPLAGTCGVLLLSLVITLYCKRGRKKLLYIFKQPFMRPVQTTQEEDGCSCRFPEEEEGGCELRVKFSRSADAPAYQQGQNQLYNELNLGRREEYDVLDKRRGRDPEMGGKPRRKNPQEGLYNELQKDKMAEAYSEIGMKGERRRGKGHDGLYQGLSTATKDTYDALHMQALPPR

SEQ ID NO: 1661 - protein, 499 aa, Artificial Sequence
  source: /note="Description of Artificial Sequence: Synthetic Chimeric Antigen Receptor sequence"
MALPVTALLLPLALLLHAARPEVQLVESGGGLVQPGRSLRLSCTASGFTFTDYYMSWVRQAPGKGLEWVGLIRSKADGYTTEYAASVKGRFTISRDDSKSIAYLQMNSLKTEDTAVYYCARDAAYYSYYSPEGAMDYWGQGTLVTVSSGGGGSGGGGSGGGGSMADYKDIQMTQSPSSVSASVGDRVTITCRASQNVDSAVAWYQQKPGKAPKLLIYSASYRYSGVPSRFSGSGSGTDFTLTISSLQPEDFATYYCQQYYSTPWTFGQGTKVEIKRTTTPAPRPPTPAPTIASQPLSLRPEACRPAAGGAVHTRGLDFACDIYIWAPLAGTCGVLLLSLVITLYCKRGRKKLLYIFKQPFMRPVQTTQEEDGCSCRFPEEEEGGCELRVKFSRSADAPAYQQGQNQLYNELNLGRREEYDVLDKRRGRDPEMGGKPRRKNPQEGLYNELQKDKMAEAYSEIGMKGERRRGKGHDGLYQGLSTATKDTYDALHMQALPPR

SEQ ID NO: 1662 - protein, 499 aa, Artificial Sequence
  source: /note="Description of Artificial Sequence: Synthetic Chimeric Antigen Receptor sequence"
MALPVTALLLPLALLLHAARPEVQLVESGGGLVQPGRSLRLSCTASGFTFTDYYMSWVRQAPGKGLEWVGLIRSKADGYTTEYAASVKGRFTISRDDSKSIAYLQMNSLKTEDTAVYYCARDAAYYSYYSPEGAMDYWGQGTLVTVSSGGGGSGGGGSGGGGSMADYKDIVMTQSPSSVSASVGDRVTITCRASQNVDSAVAWYQQKPGKAPKALIYSASYRYSGVPSRFSGRGSGTDFTLTISSLQPEDFATYYCQQYYSTPWTFGQGTKVEIKRTTTPAPRPPTPAPTIASQPLSLRPEACRPAAGGAVHTRGLDFACDIYIWAPLAGTCGVLLLSLVITLYCKRGRKKLLYIFKQPFMRPVQTTQEEDGCSCRFPEEEEGGCELRVKFSRSADAPAYQQGQNQLYNELNLGRREEYDVLDKRRGRDPEMGGKPRRKNPQEGLYNELQKDKMAEAYSEIGMKGERRRGKGHDGLYQGLSTATKDTYDALHMQALPPR

SEQ ID NO: 1663 - protein, 499 aa, Artificial Sequence
  source: /note="Description of Artificial Sequence: Synthetic Chimeric Antigen Receptor sequence"
MALPVTALLLPLALLLHAARPEVQLVESGGGLVQPGRSLRLSCTASGFTFTDYYMSWVRQAPGKGLEWVGLIRSKADGYTTEYSASVKGRFTISRDDSKSIAYLQMNSLKTEDTAVYYCARDAAYYSYYSPEGAMDYWGQGTLVTVSSGGGGSGGGGSGGGGSMADYKDIQMTQSPSSVSASVGDRVTITCRASQNVDSAVAWYQQKPGKAPKALIYSASYRYSGVPSRFSGRGSGTDFTLTISSLQPEDFATYYCQQYYSTPWTFGQGTKVEIKRTTTPAPRPPTPAPTIASQPLSLRPEACRPAAGGAVHTRGLDFACDIYIWAPLAGTCGVLLLSLVITLYCKRGRKKLLYIFKQPFMRPVQTTQEEDGCSCRFPEEEEGGCELRVKFSRSADAPAYQQGQNQLYNELNLGRREEYDVLDKRRGRDPEMGGKPRRKNPQEGLYNELQKDKMAEAYSEIGMKGERRRGKGHDGLYQGLSTATKDTYDALHMQALPPR

SEQ ID NO: 1664 - protein, 499 aa, Artificial Sequence
  source: /note="Description of Artificial Sequence: Synthetic Chimeric Antigen Receptor sequence"
MALPVTALLLPLALLLHAARPEVQLVESGGGLVQPGRSLRLSCTASGFTFTDYYMSWVRQAPGKGLEWVGLIRSKADGYTTEYSASVKGRFTISRDDSKSIAYLQMNSLKTEDTAVYYCARDAAYYSYYSPEGAMDYWGQGTLVTVSSGGGGSGGGGSGGGGSMADYKDIQMTQSPSSVSASVGDRVTITCRASQNVDSAVAWYQQKPGKAPKALIYSASYRYSGVPSRFSGSGSGTDFTLTISSLQPEDFATYYCQQYYSTPWTFGQGTKVEIKRTTTPAPRPPTPAPTIASQPLSLRPEACRPAAGGAVHTRGLDFACDIYIWAPLAGTCGVLLLSLVITLYCKRGRKKLLYIFKQPFMRPVQTTQEEDGCSCRFPEEEEGGCELRVKFSRSADAPAYQQGQNQLYNELNLGRREEYDVLDKRRGRDPEMGGKPRRKNPQEGLYNELQKDKMAEAYSEIGMKGERRRGKGHDGLYQGLSTATKDTYDALHMQALPPR

SEQ ID NO: 1665 - protein, 499 aa, Artificial Sequence
  source: /note="Description of Artificial Sequence: Synthetic Chimeric Antigen Receptor sequence"
MALPVTALLLPLALLLHAARPEVQLVESGGGLVQPGRSLRLSCTASGFTFTDYYMSWVRQAPGKGLEWVGLIRSKADGYTTEYSASVKGRFTISRDDSKSIAYLQMNSLKTEDTAVYYCARDAAYYSYYSPEGAMDYWGQGTLVTVSSGGGGSGGGGSGGGGSMADYKDIQMTQSPSSVSASVGDRVTITCRASQNVDSAVAWYQQKPGKAPKLLIYSASYGQSGVPSRFSGSGSGTDFTLTISSLQPEDFATYYCQQYYSTPWTFGQGTKVEIKRTTTPAPRPPTPAPTIASQPLSLRPEACRPAAGGAVHTRGLDFACDIYIWAPLAGTCGVLLLSLVITLYCKRGRKKLLYIFKQPFMRPVQTTQEEDGCSCRFPEEEEGGCELRVKFSRSADAPAYQQGQNQLYNELNLGRREEYDVLDKRRGRDPEMGGKPRRKNPQEGLYNELQKDKMAEAYSEIGMKGERRRGKGHDGLYQGLSTATKDTYDALHMQALPPR

SEQ ID NO: 1666 - protein, 499 aa, Artificial Sequence
  source: /note="Description of Artificial Sequence: Synthetic Chimeric Antigen Receptor sequence"
MALPVTALLLPLALLLHAARPEVQLVESGGGLVQPGRSLRLSCTASGFTFTDYYMSWVRQAPGKGLEWVGLIRSKADGYTTEYSASVKGRFTISRDDSKSIAYLQMNSLKTEDTAVYYCARDAAYYSYYSPEGAMDYWGQGTLVTVSSGGGGSGGGGSGGGGSMADYKDIQMTQSPSSVSASVGDRVTITCRASQNVDSAVAWYQQKPGKAPKLLIYSASYRQSGVPSRFSGSGSGTDFTLTISSLQPEDFATYYCQQYYSTPWTFGQGTKVEIKRTTTPAPRPPTPAPTIASQPLSLRPEACRPAAGGAVHTRGLDFACDIYIWAPLAGTCGVLLLSLVITLYCKRGRKKLLYIFKQPFMRPVQTTQEEDGCSCRFPEEEEGGCELRVKFSRSADAPAYQQGQNQLYNELNLGRREEYDVLDKRRGRDPEMGGKPRRKNPQEGLYNELQKDKMAEAYSEIGMKGERRRGKGHDGLYQGLSTATKDTYDALHMQALPPR

SEQ ID NO: 1667 - protein, 499 aa, Artificial Sequence
  source: /note="Description of Artificial Sequence: Synthetic Chimeric Antigen Receptor sequence"
MALPVTALLLPLALLLHAARPEVQLVESGGGLVQPGRSLRLSCTASGFTFTDYYMSWVRQAPGKGLEWVGLIRSKADGYTTEYSASVKGRFTISRDDSKSIAYLQMNSLKTEDTAVYYCARDAAYYSYYSPEGAMDYWGQGTLVTVSSGGGGSGGGGSGGGGSMADYKDIQMTQSPSSVSASVGDRVTITCRASQNVDSAVAWYQQKPGKAPKLLIYSASYRYSGVPSRFSGSGSGTDFTLTISSLQPEDFATYYCQQYYSTPWTFGQGTKVEIKRTTTPAPRPPTPAPTIASQPLSLRPEACRPAAGGAVHTRGLDFACDIYIWAPLAGTCGVLLLSLVITLYCKRGRKKLLYIFKQPFMRPVQTTQEEDGCSCRFPEEEEGGCELRVKFSRSADAPAYQQGQNQLYNELNLGRREEYDVLDKRRGRDPEMGGKPRRKNPQEGLYNELQKDKMAEAYSEIGMKGERRRGKGHDGLYQGLSTATKDTYDALHMQALPPR

SEQ ID NO: 1668 - protein, 499 aa, Artificial Sequence
  source: /note="Description of Artificial Sequence: Synthetic Chimeric Antigen Receptor sequence"
MALPVTALLLPLALLLHAARPEVQLVESGGGLVQPGRSLRLSCTASGFTFTDYYMSWVRQAPGKGLEWVGLIRSKADGYTTEYSASVKGRFTISRDDSKSIAYLQMNSLKTEDTAVYYCARDAAYYSYYSPEGAMDYWGQGTLVTVSSGGGGSGGGGSGGGGSMADYKDIVMTQSPSSVSASVGDRVTITCRASQNVDSAVAWYQQKPGKAPKALIYSASYRYSGVPSRFSGRGSGTDFTLTISSLQPEDFATYYCQQYYSTPWTFGQGTKVEIKRTTTPAPRPPTPAPTIASQPLSLRPEACRPAAGGAVHTRGLDFACDIYIWAPLAGTCGVLLLSLVITLYCKRGRKKLLYIFKQPFMRPVQTTQEEDGCSCRFPEEEEGGCELRVKFSRSADAPAYQQGQNQLYNELNLGRREEYDVLDKRRGRDPEMGGKPRRKNPQEGLYNELQKDKMAEAYSEIGMKGERRRGKGHDGLYQGLSTATKDTYDALHMQALPPR

SEQ ID NO: 1669 - protein, 499 aa, Artificial Sequence
  source: /note="Description of Artificial Sequence: Synthetic Chimeric Antigen Receptor sequence"
MALPVTALLLPLALLLHAARPEVQLVESGGGLVQPGRSLRLSCTASGFTFTDYYMSWVRQAPGKGLEWVGLIRSKADGYTTEYSASVKGRFTISRDDSKSILYLQMNSLKTEDTAVYYCARDAAYYSYYSPEGAMDYWGQGTLVTVSSGGGGSGGGGSGGGGSMADYKDIQMTQSPSSVSASVGDRVTITCRASQNVDSAVAWYQQKPGKAPKALIYSASYRYSGVPSRFSGRGSGTDFTLTISSLQPEDFATYYCQQYYSTPWTFGQGTKVEIKRTTTPAPRPPTPAPTIASQPLSLRPEACRPAAGGAVHTRGLDFACDIYIWAPLAGTCGVLLLSLVITLYCKRGRKKLLYIFKQPFMRPVQTTQEEDGCSCRFPEEEEGGCELRVKFSRSADAPAYQQGQNQLYNELNLGRREEYDVLDKRRGRDPEMGGKPRRKNPQEGLYNELQKDKMAEAYSEIGMKGERRRGKGHDGLYQGLSTATKDTYDALHMQALPPR

SEQ ID NO: 1670 - protein, 499 aa, Artificial Sequence
  source: /note="Description of Artificial Sequence: Synthetic Chimeric Antigen Receptor sequence"
MALPVTALLLPLALLLHAARPEVQLVESGGGLVQPGRSLRLSCTASGFTFTDYYMSWVRQAPGKGLEWVGLIRSKADGYTTEYSASVKGRFTISRDDSKSILYLQMNSLKTEDTAVYYCARDAAYYSYYSPEGAMDYWGQGTLVTVSSGGGGSGGGGSGGGGSMADYKDIQMTQSPSSVSASVGDRVTITCRASQNVDSAVAWYQQKPGKAPKALIYSASYRYSGVPSRFSGSGSGTDFTLTISSLQPEDFATYYCQQYYSTPWTFGQGTKVEIKRTTTPAPRPPTPAPTIASQPLSLRPEACRPAAGGAVHTRGLDFACDIYIWAPLAGTCGVLLLSLVITLYCKRGRKKLLYIFKQPFMRPVQTTQEEDGCSCRFPEEEEGGCELRVKFSRSADAPAYQQGQNQLYNELNLGRREEYDVLDKRRGRDPEMGGKPRRKNPQEGLYNELQKDKMAEAYSEIGMKGERRRGKGHDGLYQGLSTATKDTYDALHMQALPPR

SEQ ID NO: 1671 - protein, 499 aa, Artificial Sequence
  source: /note="Description of Artificial Sequence: Synthetic Chimeric Antigen Receptor sequence"
MALPVTALLLPLALLLHAARPEVQLVESGGGLVQPGRSLRLSCTASGFTFTDYYMSWVRQAPGKGLEWVGLIRSKADGYTTEYSASVKGRFTISRDDSKSILYLQMNSLKTEDTAVYYCARDAAYYSYYSPEGAMDYWGQGTLVTVSSGGGGSGGGGSGGGGSMADYKDIQMTQSPSSVSASVGDRVTITCRASQNVDSAVAWYQQKPGKAPKLLIYSASYGQSGVPSRFSGSGSGTDFTLTISSLQPEDFATYYCQQYYSTPWTFGQGTKVEIKRTTTPAPRPPTPAPTIASQPLSLRPEACRPAAGGAVHTRGLDFACDIYIWAPLAGTCGVLLLSLVITLYCKRGRKKLLYIFKQPFMRPVQTTQEEDGCSCRFPEEEEGGCELRVKFSRSADAPAYQQGQNQLYNELNLGRREEYDVLDKRRGRDPEMGGKPRRKNPQEGLYNELQKDKMAEAYSEIGMKGERRRGKGHDGLYQGLSTATKDTYDALHMQALPPR

SEQ ID NO: 1672 - protein, 499 aa, Artificial Sequence
  source: /note="Description of Artificial Sequence: Synthetic Chimeric Antigen Receptor sequence"
MALPVTALLLPLALLLHAARPEVQLVESGGGLVQPGRSLRLSCTASGFTFTDYYMSWVRQAPGKGLEWVGLIRSKADGYTTEYSASVKGRFTISRDDSKSILYLQMNSLKTEDTAVYYCARDAAYYSYYSPEGAMDYWGQGTLVTVSSGGGGSGGGGSGGGGSMADYKDIQMTQSPSSVSASVGDRVTITCRASQNVDSAVAWYQQKPGKAPKLLIYSASYRQSGVPSRFSGSGSGTDFTLTISSLQPEDFATYYCQQYYSTPWTFGQGTKVEIKRTTTPAPRPPTPAPTIASQPLSLRPEACRPAAGGAVHTRGLDFACDIYIWAPLAGTCGVLLLSLVITLYCKRGRKKLLYIFKQPFMRPVQTTQEEDGCSCRFPEEEEGGCELRVKFSRSADAPAYQQGQNQLYNELNLGRREEYDVLDKRRGRDPEMGGKPRRKNPQEGLYNELQKDKMAEAYSEIGMKGERRRGKGHDGLYQGLSTATKDTYDALHMQALPPR

SEQ ID NO: 1673 - protein, 499 aa, Artificial Sequence
  source: /note="Description of Artificial Sequence: Synthetic Chimeric Antigen Receptor sequence"
MALPVTALLLPLALLLHAARPEVQLVESGGGLVQPGRSLRLSCTASGFTFTDYYMSWVRQAPGKGLEWVGLIRSKADGYTTEYSASVKGRFTISRDDSKSILYLQMNSLKTEDTAVYYCARDAAYYSYYSPEGAMDYWGQGTLVTVSSGGGGSGGGGSGGGGSMADYKDIQMTQSPSSVSASVGDRVTITCRASQNVDSAVAWYQQKPGKAPKLLIYSASYRYSGVPSRFSGSGSGTDFTLTISSLQPEDFATYYCQQYYSTPWTFGQGTKVEIKRTTTPAPRPPTPAPTIASQPLSLRPEACRPAAGGAVHTRGLDFACDIYIWAPLAGTCGVLLLSLVITLYCKRGRKKLLYIFKQPFMRPVQTTQEEDGCSCRFPEEEEGGCELRVKFSRSADAPAYQQGQNQLYNELNLGRREEYDVLDKRRGRDPEMGGKPRRKNPQEGLYNELQKDKMAEAYSEIGMKGERRRGKGHDGLYQGLSTATKDTYDALHMQALPPR

SEQ ID NO: 1674 - protein, 499 aa, Artificial Sequence
  source: /note="Description of Artificial Sequence: Synthetic Chimeric Antigen Receptor sequence"
MALPVTALLLPLALLLHAARPEVQLVESGGGLVQPGRSLRLSCTASGFTFTDYYMSWVRQAPGKGLEWVGLIRSKADGYTTEYSASVKGRFTISRDDSKSILYLQMNSLKTEDTAVYYCARDAAYYSYYSPEGAMDYWGQGTLVTVSSGGGGSGGGGSGGGGSMADYKDIVMTQSPSSVSASVGDRVTITCRASQNVDSAVAWYQQKPGKAPKALIYSASYRYSGVPSRFSGRGSGTDFTLTISSLQPEDFATYYCQQYYSTPWTFGQGTKVEIKRTTTPAPRPPTPAPTIASQPLSLRPEACRPAAGGAVHTRGLDFACDIYIWAPLAGTCGVLLLSLVITLYCKRGRKKLLYIFKQPFMRPVQTTQEEDGCSCRFPEEEEGGCELRVKFSRSADAPAYQQGQNQLYNELNLGRREEYDVLDKRRGRDPEMGGKPRRKNPQEGLYNELQKDKMAEAYSEIGMKGERRRGKGHDGLYQGLSTATKDTYDALHMQALPPR

SEQ ID NO: 1675 - protein, 501 aa, Artificial Sequence
  source: /note="Description of Artificial Sequence: Synthetic Chimeric Antigen Receptor sequence"
MALPVTALLLPLALLLHAARPQIQLVQSGPELKKPGETVKISCKASGYIFTNYGMNWVKQAPGKSFKWMGWINTYTGESTYSADFKGRFAFSLETSASTAYLHINDLKNEDTATYFCARSGGYDPMDYWGQGTSVTVSSGGGGGGCPYSNPSLCGGGGGGGSDIVLTQSPASLAVSLGQRATISCRASESVDNYGNTFMHWYQQKPGQPPKLLIYRASNLESGIPARFSGSGSRTDFTLTINPVEADDVATYYCQQSNEDPPTFGAGTKLELKRSDPTTTPAPRPPTPAPTIASQPLSLRPEACRPAAGGAVHTRGLDFACDIYIWAPLAGTCGVLLLSLVITLYCRRGRKKLLYIFKQPFMRPVQTTQEEDGCSCRFPEEEEGGCELRVKFSRSADAPAYQQGQNQLYNELNLGRREEYDVLDKRRGRDPEMGGKPRRKNPQEGLYNELQKDKMAEAYSEIGMKGERRRGKGHDGLYQGLSTATKDTYDALHMQALPPRE

SEQ ID NO: 1676 - protein, 508 aa, Artificial Sequence
  source: /note="Description of Artificial Sequence: Synthetic Chimeric Antigen Receptor sequence"
MALPVTALLLPLALLLHAARPGGGGSCPYSNPSLCGQIQLVQSGPELKKPGETVKISCKASGYIFTNYGMNWVKQAPGKSFKWMGWINTYTGESTYSADFKGRFAFSLETSASTAYLHINDLKNEDTATYFCARSGGYDPMDYWGQGTSVTVSSGGGGSGGGGSGGGGSDIVLTQSPASLAVSLGQRATISCRASESVDNYGNTFMHWYQQKPGQPPKLLIYRASNLESGIPARFSGSGSRTDFTLTINPVEADDVATYYCQQSNEDPPTFGAGTKLELKRSDPTTTPAPRPPTPAPTIASQPLSLRPEACRPAAGGAVHTRGLDFACDIYIWAPLAGTCGVLLLSLVITLYCRRGRKKLLYIFKQPFMRPVQTTQEEDGCSCRFPEEEEGGCELRVKFSRSADAPAYQQGQNQLYNELNLGRREEYDVLDKRRGRDPEMGGKPRRKNPQEGLYNELQKDKMAEAYSEIGMKGERRRGKGHDGLYQGLSTATKDTYDALHMQALPPRE

SEQ ID NO: 1677 - protein, 510 aa, Artificial Sequence
  source: /note="Description of Artificial Sequence: Synthetic Chimeric Antigen Receptor sequence"
WTWRFLFVVAAATGVQSQVQLLQSGAEVKKPGSSVKVSCKASGGTFSTYAISWVRQAPGQGLEWMGGIIPIFGIVNYAQKFQGRVTITADESTSTAYMELSSLRSEDTAVYYCARGGGSGPDVLDIWGQGTMVTVSSASTGGGGSGGGGSGGGGSMDMRVPAQLLGLLLLWLPGARCVIWMTQSPSLLSASTGDRVTISCRMSQGIRSYLAWYQQKPGKAPELLIYAASTLQSGVPSRFSGSGSGTDFTLTISSLQSEDFATYYCQQYYSFPYTFGQGTKLEIKRTVTTTPAPRPPTPAPTIASQPLSLRPEACRPAAGGAVHTRGLDFACDIYIWAPLAGTCGVLLLSLVITLYCKRGRKKLLYIFKQPFMRPVQTTQEEDGCSCRFPEEEEGGCELRVKFSRSADAPAYQQGQNQLYNELNLGRREEYDVLDKRRGRDPEMGGKPRRKNPQEGLYNELQKDKMAEAYSEIGMKGERRRGKGHDGLYQGLSTATKDTYDALHMQALPPR

SEQ ID NO: 1678 - protein, 511 aa, Artificial Sequence
  source: /note="Description of Artificial Sequence: Synthetic Chimeric Antigen Receptor sequence"
MALPVTALLLPLALLLHAARPQIQLVQSGPELKKPGETVKISCKASGYIFTNYGMNWVKQAPGKSFKWMGWINTYTGESTYSADFKGRFAFSLETSASTAYLHINDLKNEDTATYFCARSGGYDPMDYWGQGTSVTVSSGGGGSGGGGSGGGGSDIVLTQSPASLAVSLGQRATISCRASESVDNYGNTFMHWYQQKPGQPPKLLIYRASNLESGIPARFSGSGSRTDFTLTINPVEADDVATYYCQQSNEDPPTFGAGTKLELKRSDPGSGGGGSCPYSNPSLCAPTTTPAPRPPTPAPTIASQPLSLRPEACRPAAGGAVHTRGLDFACDIYIWAPLAGTCGVLLLSLVITLYCRRGRKKLLYIFKQPFMRPVQTTQEEDGCSCRFPEEEEGGCELRVKFSRSADAPAYQQGQNQLYNELNLGRREEYDVLDKRRGRDPEMGGKPRRKNPQEGLYNELQKDKMAEAYSEIGMKGERRRGKGHDGLYQGLSTATKDTYDALHMQALPPRE

SEQ ID NO: 1679 - protein, 513 aa, Artificial Sequence
  source: /note="Description of Artificial Sequence: Synthetic Chimeric Antigen Receptor sequence"
MGWSWIFLFLVSGTGGVLSEVQLQQSGPELVKPGASVKMSCKASGYTFTDYYMKWVKQSHGKSLEWIGDIIPSNGATFYNQKFKGKATLTVDRSSSTAYMHLNSLTSEDSAVYYCTRSHLLRASWFAYWGQGTLVTVSAASGGGGSGGGGSGGGGSMESQTQVLMSLLFWVSGTCGDFVMTQSPSSLTVTAGEKVTMSCKSSQSLLNSGNQKNYLTWYLQKPGQPPKLLIYWASTRESGVPDRFTGSGSGTDFTLTISSVQAEDLAVYYCQNDYSYPYTFGGGTKLEIKRTTTPAPRPPTPAPTIASQPLSLRPEACRPAAGGAVHTRGLDFACDIYIWAPLAGTCGVLLLSLVITLYCKRGRKKLLYIFKQPFMRPVQTTQEEDGCSCRFPEEEEGGCELRVKFSRSADAPAYQQGQNQLYNELNLGRREEYDVLDKRRGRDPEMGGKPRRKNPQEGLYNELQKDKMAEAYSEIGMKGERRRGKGHDGLYQGLSTATKDTYDALHMQALPPR

SEQ ID NO: 1680 - protein, 514 aa, Artificial Sequence
  source: /note="Description of Artificial Sequence: Synthetic Chimeric Antigen Receptor sequence"
MALPVTALLLPLALLLHAARPGGGGSCPYSNPSLCSGGGGSGQIQLVQSGPELKKPGETVKISCKASGYIFTNYGMNWVKQAPGKSFKWMGWINTYTGESTYSADFKGRFAFSLETSASTAYLHINDLKNEDTATYFCARSGGYDPMDYWGQGTSVTVSSGGGGSGGGGSGGGGSDIVLTQSPASLAVSLGQRATISCRASESVDNYGNTFMHWYQQKPGQPPKLLIYRASNLESGIPARFSGSGSRTDFTLTINPVEADDVATYYCQQSNEDPPTFGAGTKLELKRSDPTTTPAPRPPTPAPTIASQPLSLRPEACRPAAGGAVHTRGLDFACDIYIWAPLAGTCGVLLLSLVITLYCRRGRKKLLYIFKQPFMRPVQTTQEEDGCSCRFPEEEEGGCELRVKFSRSADAPAYQQGQNQLYNELNLGRREEYDVLDKRRGRDPEMGGKPRRKNPQEGLYNELQKDKMAEAYSEIGMKGERRRGKGHDGLYQGLSTATKDTYDALHMQALPPRE

SEQ ID NO: 1681 - protein, 516 aa, Artificial Sequence
  source: /note="Description of Artificial Sequence: Synthetic Chimeric Antigen Receptor sequence"
MGWSWIFLFLVSGTGGVLSEVQLQQSGPELVKPGASVKMSCKASGYTFTDYYMKWVKQSHGKSLEWIGDIIPSNGATFYNQKFKGKATLTVDRSSSTAYMHLNSLTSEDSAVYYCTRSHLLRASWFAYWGQGTLVTVSAASGGGGSGGGGSGGGGSMESQTQVLMSLLFWVSGTCGDFVMTQSPSSLTVTAGEKVTMSCKSSQSLLNSGNQKNYLTWYLQKPGQPPKLLIYWASTRESGVPDRFTGSGSGTDFTLTISSVQAEDLAVYYCQNDYSYPYTFGGGTKLEIKRTTTPAPRPPTPAPTIASQPLSLRPEACRPAAGGAVHTRGLDFACDIISFFLALTSTALLFLLFFLTLRFSVVKRGRKKLLYIFKQPFMRPVQTTQEEDGCSCRFPEEEEGGCELRVKFSRSADAPAYQQGQNQLYNELNLGRREEYDVLDKRRGRDPEMGGKPRRKNPQEGLYNELQKDKMAEAYSEIGMKGERRRGKGHDGLYQGLSTATKDTYDALHMQALPPR

SEQ ID NO: 1682 - protein, 517 aa, Artificial Sequence
  source: /note="Description of Artificial Sequence: Synthetic Chimeric Antigen Receptor sequence"
MALPVTALLLPLALLLHAARPQIQLVQSGPELKKPGETVKISCKASGYIFTNYGMNWVKQAPGKSFKWMGWINTYTGESTYSADFKGRFAFSLETSASTAYLHINDLKNEDTATYFCARSGGYDPMDYWGQGTSVTVSSGGGGSGGGGSGGGGSDIVLTQSPASLAVSLGQRATISCRASESVDNYGNTFMHWYQQKPGQPPKLLIYRASNLESGIPARFSGSGSRTDFTLTINPVEADDVATYYCQQSNEDPPTFGAGTKLELKRSDPGSGGGGSCPYSNPSLCSGGGGSAPTTTPAPRPPTPAPTIASQPLSLRPEACRPAAGGAVHTRGLDFACDIYIWAPLAGTCGVLLLSLVITLYCRRGRKKLLYIFKQPFMRPVQTTQEEDGCSCRFPEEEEGGCELRVKFSRSADAPAYQQGQNQLYNELNLGRREEYDVLDKRRGRDPEMGGKPRRKNPQEGLYNELQKDKMAEAYSEIGMKGERRRGKGHDGLYQGLSTATKDTYDALHMQALPPRE

SEQ ID NO: 1683 - protein, 520 aa, Artificial Sequence
  source: /note="Description of Artificial Sequence: Synthetic Chimeric Antigen Receptor sequence"
GPVPPSTALRYLIEELVNITQNQKAPLCNGSMVWSINLTAGMYCAALESLINVSGCSAIEKTQRMLSGFCPHKVSAGQFSSLHVRDTKIEVAQFVKDLLLHLKKLFREGRFNESKYGPPCPPCPAPEFEGGPSVFLFPPKPKDTLMISRTPEVTCVVVDVSQEDPEVQFNWYVDGVEVHNAKTKPREEQFQSTYRVVSVLTVLHQDWLNGKEYKCKVSNKGLPSSIEKTISKAKGQPREPQVYTLPPSQEEMTKNQVSLTCLVKGFYPSDIAVEWESNGQPENNYKTTPPVLDSDGSFFLYSRLTVDKSRWQEGNVFSCSVMHEALHNHYTQKSLSLSLGKMALIVLGGVAGLLLFIGLGIFFKRGRKKLLYIFKQPFMRPVQTTQEEDGCSCRFPEEEEGGCELGGGRVKFSRSADAPAYQQGQNQLYNELNLGRREEYDVLDKRRGRDPEMGGKPRRKNPQEGLYNELQKDKMAEAYSEIGMKGERRRGKGHDGLYQGLSTATKDTYDALHMQALPPR

SEQ ID NO: 1684 - protein, 523 aa, Artificial Sequence
  source: /note="Description of Artificial Sequence: Synthetic Chimeric Antigen Receptor sequence"
MALPVTALLLPLALLLHAARPGGGGSCPYSNPSLCSGGGGSCPYSNPSLCGQIQLVQSGPELKKPGETVKISCKASGYIFTNYGMNWVKQAPGKSFKWMGWINTYTGESTYSADFKGRFAFSLETSASTAYLHINDLKNEDTATYFCARSGGYDPMDYWGQGTSVTVSSGGGGSGGGGSGGGGSDIVLTQSPASLAVSLGQRATISCRASESVDNYGNTFMHWYQQKPGQPPKLLIYRASNLESGIPARFSGSGSRTDFTLTINPVEADDVATYYCQQSNEDPPTFGAGTKLELKRSDPTTTPAPRPPTPAPTIASQPLSLRPEACRPAAGGAVHTRGLDFACDIYIWAPLAGTCGVLLLSLVITLYCRRGRKKLLYIFKQPFMRPVQTTQEEDGCSCRFPEEEEGGCELRVKFSRSADAPAYQQGQNQLYNELNLGRREEYDVLDKRRGRDPEMGGKPRRKNPQEGLYNELQKDKMAEAYSEIGMKGERRRGKGHDGLYQGLSTATKDTYDALHMQALPPRE

SEQ ID NO: 1685 - protein, 526 aa, Artificial Sequence
  source: /note="Description of Artificial Sequence: Synthetic Chimeric Antigen Receptor sequence"
MALPVTALLLPLALLLHAARPEVKLVESGGGLVQPGGSLSLSCAASGFTFTDYYMSWVRQPPGKALEWLALIRSKADGYTTEYSASVKGRFTLSRDDSQSILYLQMNALRPEDSATYYCARDAAYYSYYSPEGAMDYWGQGTSVTVSSGGGGSGGGGSGGGGSMADYKDIVMTQSHKFMSTSVGDRVNITCKASQNVDSAVAWYQQKPGQSPKALIYSASYRYSGVPDRFTGRGSGTDFTLTISSVQAEDLAVYYCQQYYSTPWTFGGGTKLEIKRGSGGGGSCPYSNPSLCSGGGGSCPYSNPSLCSGGGGSAPTIASQPLSLRPEACRPAAGGAVHTRGLDFACDIYIWAPLAGTCGVLLLSLVITLYCRRGRKKLLYIFKQPFMRPVQTTQEEDGCSCRFPEEEEGGCELRVKFSRSADAPAYQQGQNQLYNELNLGRREEYDVLDKRRGRDPEMGGKPRRKNPQEGLYNELQKDKMAEAYSEIGMKGERRRGKGHDGLYQGLSTATKDTYDALHMQALPPRE

SEQ ID NO: 1686 - protein, 526 aa, Artificial Sequence
  source: /note="Description of Artificial Sequence: Synthetic Chimeric Antigen Receptor sequence"
MALPVTALLLPLALLLHAARPQIQLVQSGPELKKPGETVKISCKASGYIFTNYGMNWVKQAPGKSFKWMGWINTYTGESTYSADFKGRFAFSLETSASTAYLHINDLKNEDTATYFCARSGGYDPMDYWGQGTSVTVSSGGGGSGGGGSGGGGSDIVLTQSPASLAVSLGQRATISCRASESVDNYGNTFMHWYQQKPGQPPKLLIYRASNLESGIPARFSGSGSRTDFTLTINPVEADDVATYYCQQSNEDPPTFGAGTKLELKRSDPGSGGGGSCPYSNPSLCSGGGGSCPYSNPSLCAPTTTPAPRPPTPAPTIASQPLSLRPEACRPAAGGAVHTRGLDFACDIYIWAPLAGTCGVLLLSLVITLYCRRGRKKLLYIFKQPFMRPVQTTQEEDGCSCRFPEEEEGGCELRVKFSRSADAPAYQQGQNQLYNELNLGRREEYDVLDKRRGRDPEMGGKPRRKNPQEGLYNELQKDKMAEAYSEIGMKGERRRGKGHDGLYQGLSTATKDTYDALHMQALPPRE

SEQ ID NO: 1687 - protein, 529 aa, Artificial Sequence
  source: /note="Description of Artificial Sequence: Synthetic Chimeric Antigen Receptor sequence"
MALPVTALLLPLALLLHAARPGGGGSCPYSNPSLCSGGGGSCPYSNPSLCSGGGGSGQIQLVQSGPELKKPGETVKISCKASGYIFTNYGMNWVKQAPGKSFKWMGWINTYTGESTYSADFKGRFAFSLETSASTAYLHINDLKNEDTATYFCARSGGYDPMDYWGQGTSVTVSSGGGGSGGGGSGGGGSDIVLTQSPASLAVSLGQRATISCRASESVDNYGNTFMHWYQQKPGQPPKLLIYRASNLESGIPARFSGSGSRTDFTLTINPVEADDVATYYCQQSNEDPPTFGAGTKLELKRSDPTTTPAPRPPTPAPTIASQPLSLRPEACRPAAGGAVHTRGLDFACDIYIWAPLAGTCGVLLLSLVITLYCRRGRKKLLYIFKQPFMRPVQTTQEEDGCSCRFPEEEEGGCELRVKFSRSADAPAYQQGQNQLYNELNLGRREEYDVLDKRRGRDPEMGGKPRRKNPQEGLYNELQKDKMAEAYSEIGMKGERRRGKGHDGLYQGLSTATKDTYDALHMQALPPRE

SEQ ID NO: 1688 - protein, 531 aa, Artificial Sequence
  source: /note="Description of Artificial Sequence: Synthetic Chimeric Antigen Receptor sequence"
MALPVTALLLPLALLLHAARPEVKLVESGGGLVQPGRSLRLSCTASGFTFTDYYMSWVRQAPGKGLEWVGLIRSKADGYTTEYSASVKGRFTISRDDSKSILYLQMNSLKTEDTAVYYCARDAAYYSYYSPEGAMDYWGQGTLVTVSSGGGGSGGGGSGGGGSMADYKDIQMTQSPSSVSASVGDRVTITCRASQNVDSAVAWYQQKPGKAPKALIYSASYRYSGVPSRFSGRGSGTDFTLTISSLQPEDFATYYCQQYYSTPWTFGQGTKVEIKREPKSPDKTHTCPPCPAPPVAGPSVFLFPPKPKDTLMIARTPEVTCVVVDVSHEDPEVKFNWYVDGVEVHNAKTKPREEQYNSTYRVVSVLTVLHQDWLNGKEYKCKVSNKALPAPIEKTISKAKGQPREPQVYTLPPSRDELTKNQVSLTCLVKGFYPSDIAVEWESNGQPENNYKTTPPVLDSDGSFFLYSKLTVDKSRWQQGNVFSCSVMHEALHNHYTQKSLSLSPGKIYIWAPLAGTCGVLLLSLVITLYC

SEQ ID NO: 1689 - protein, 531 aa, Artificial Sequence
  source: /note="Description of Artificial Sequence: Synthetic Chimeric Antigen Receptor sequence"
MALPVTALLLPLALLLHAARPEVKLVESGGGLVQPGRSLRLSCTASGFTFTDYYMSWVRQAPGKGLEWVGLIRSKADGYTTEYSASVKGRFTISRDDSKSILYLQMNSLKTEDTAVYYCARDAAYYSYYSPEGAMDYWGQGTLVTVSSGGGGSGGGGSGGGGSMADYKDIQMTQSPSSVSASVGDRVTITCRASQNVDSAVAWYQQKPGKAPKALIYSASYRYSGVPSRFSGSGSGTDFTLTISSLQPEDFATYYCQQYYSTPWTFGQGTKVEIKREPKSPDKTHTCPPCPAPPVAGPSVFLFPPKPKDTLMIARTPEVTCVVVDVSHEDPEVKFNWYVDGVEVHNAKTKPREEQYNSTYRVVSVLTVLHQDWLNGKEYKCKVSNKALPAPIEKTISKAKGQPREPQVYTLPPSRDELTKNQVSLTCLVKGFYPSDIAVEWESNGQPENNYKTTPPVLDSDGSFFLYSKLTVDKSRWQQGNVFSCSVMHEALHNHYTQKSLSLSPGKIYIWAPLAGTCGVLLLSLVITLYC

SEQ ID NO: 1690 - protein, 531 aa, Artificial Sequence
  source: /note="Description of Artificial Sequence: Synthetic Chimeric Antigen Receptor sequence"
MALPVTALLLPLALLLHAARPEVKLVESGGGLVQPGRSLRLSCTASGFTFTDYYMSWVRQAPGKGLEWVGLIRSKADGYTTEYSASVKGRFTISRDDSKSILYLQMNSLKTEDTAVYYCARDAAYYSYYSPEGAMDYWGQGTLVTVSSGGGGSGGGGSGGGGSMADYKDIQMTQSPSSVSASVGDRVTITCRASQNVDSAVAWYQQKPGKAPKLLIYSASYGQSGVPSRFSGSGSGTDFTLTISSLQPEDFATYYCQQYYSTPWTFGQGTKVEIKREPKSPDKTHTCPPCPAPPVAGPSVFLFPPKPKDTLMIARTPEVTCVVVDVSHEDPEVKFNWYVDGVEVHNAKTKPREEQYNSTYRVVSVLTVLHQDWLNGKEYKCKVSNKALPAPIEKTISKAKGQPREPQVYTLPPSRDELTKNQVSLTCLVKGFYPSDIAVEWESNGQPENNYKTTPPVLDSDGSFFLYSKLTVDKSRWQQGNVFSCSVMHEALHNHYTQKSLSLSPGKIYIWAPLAGTCGVLLLSLVITLYC

SEQ ID NO: 1691 - protein, 531 aa, Artificial Sequence
  source: /note="Description of Artificial Sequence: Synthetic Chimeric Antigen Receptor sequence"
MALPVTALLLPLALLLHAARPEVKLVESGGGLVQPGRSLRLSCTASGFTFTDYYMSWVRQAPGKGLEWVGLIRSKADGYTTEYSASVKGRFTISRDDSKSILYLQMNSLKTEDTAVYYCARDAAYYSYYSPEGAMDYWGQGTLVTVSSGGGGSGGGGSGGGGSMADYKDIQMTQSPSSVSASVGDRVTITCRASQNVDSAVAWYQQKPGKAPKLLIYSASYRQSGVPSRFSGSGSGTDFTLTISSLQPEDFATYYCQQYYSTPWTFGQGTKVEIKREPKSPDKTHTCPPCPAPPVAGPSVFLFPPKPKDTLMIARTPEVTCVVVDVSHEDPEVKFNWYVDGVEVHNAKTKPREEQYNSTYRVVSVLTVLHQDWLNGKEYKCKVSNKALPAPIEKTISKAKGQPREPQVYTLPPSRDELTKNQVSLTCLVKGFYPSDIAVEWESNGQPENNYKTTPPVLDSDGSFFLYSKLTVDKSRWQQGNVFSCSVMHEALHNHYTQKSLSLSPGKIYIWAPLAGTCGVLLLSLVITLYC

SEQ ID NO: 1692 - protein, 531 aa, Artificial Sequence
  source: /note="Description of Artificial Sequence: Synthetic Chimeric Antigen Receptor sequence"
MALPVTALLLPLALLLHAARPEVKLVESGGGLVQPGRSLRLSCTASGFTFTDYYMSWVRQAPGKGLEWVGLIRSKADGYTTEYSASVKGRFTISRDDSKSILYLQMNSLKTEDTAVYYCARDAAYYSYYSPEGAMDYWGQGTLVTVSSGGGGSGGGGSGGGGSMADYKDIQMTQSPSSVSASVGDRVTITCRASQNVDSAVAWYQQKPGKAPKLLIYSASYRYSGVPSRFSGSGSGTDFTLTISSLQPEDFATYYCQQYYSTPWTFGQGTKVEIKREPKSPDKTHTCPPCPAPPVAGPSVFLFPPKPKDTLMIARTPEVTCVVVDVSHEDPEVKFNWYVDGVEVHNAKTKPREEQYNSTYRVVSVLTVLHQDWLNGKEYKCKVSNKALPAPIEKTISKAKGQPREPQVYTLPPSRDELTKNQVSLTCLVKGFYPSDIAVEWESNGQPENNYKTTPPVLDSDGSFFLYSKLTVDKSRWQQGNVFSCSVMHEALHNHYTQKSLSLSPGKIYIWAPLAGTCGVLLLSLVITLYC

SEQ ID NO: 1693 - protein, 531 aa, Artificial Sequence
  source: /note="Description of Artificial Sequence: Synthetic Chimeric Antigen Receptor sequence"
MALPVTALLLPLALLLHAARPEVKLVESGGGLVQPGRSLRLSCTASGFTFTDYYMSWVRQAPGKGLEWVGLIRSKADGYTTEYSASVKGRFTISRDDSKSILYLQMNSLKTEDTAVYYCARDAAYYSYYSPEGAMDYWGQGTLVTVSSGGGGSGGGGSGGGGSMADYKDIVMTQSPSSVSASVGDRVTITCRASQNVDSAVAWYQQKPGKAPKALIYSASYRYSGVPSRFSGRGSGTDFTLTISSLQPEDFATYYCQQYYSTPWTFGQGTKVEIKREPKSPDKTHTCPPCPAPPVAGPSVFLFPPKPKDTLMIARTPEVTCVVVDVSHEDPEVKFNWYVDGVEVHNAKTKPREEQYNSTYRVVSVLTVLHQDWLNGKEYKCKVSNKALPAPIEKTISKAKGQPREPQVYTLPPSRDELTKNQVSLTCLVKGFYPSDIAVEWESNGQPENNYKTTPPVLDSDGSFFLYSKLTVDKSRWQQGNVFSCSVMHEALHNHYTQKSLSLSPGKIYIWAPLAGTCGVLLLSLVITLYC

SEQ ID NO: 1694 - protein, 531 aa, Artificial Sequence
  source: /note="Description of Artificial Sequence: Synthetic Chimeric Antigen Receptor sequence"
MALPVTALLLPLALLLHAARPEVQLVESGGGLVQPGRSLRLSCTASGFTFTDYYMSWVRQAPGKGLEWVGFIRSKADGYTTEYAASVKGRFTISRDDSKSIAYLQMNSLKTEDTAVYYCARDAAYYSYYSPEGAMDYWGQGTLVTVSSGGGGSGGGGSGGGGSMADYKDIQMTQSPSSVSASVGDRVTITCRASQNVDSAVAWYQQKPGKAPKALIYSASYRYSGVPSRFSGRGSGTDFTLTISSLQPEDFATYYCQQYYSTPWTFGQGTKVEIKREPKSPDKTHTCPPCPAPPVAGPSVFLFPPKPKDTLMIARTPEVTCVVVDVSHEDPEVKFNWYVDGVEVHNAKTKPREEQYNSTYRVVSVLTVLHQDWLNGKEYKCKVSNKALPAPIEKTISKAKGQPREPQVYTLPPSRDELTKNQVSLTCLVKGFYPSDIAVEWESNGQPENNYKTTPPVLDSDGSFFLYSKLTVDKSRWQQGNVFSCSVMHEALHNHYTQKSLSLSPGKIYIWAPLAGTCGVLLLSLVITLYC

SEQ ID NO: 1695 - protein, 531 aa, Artificial Sequence
  source: /note="Description of Artificial Sequence: Synthetic Chimeric Antigen Receptor sequence"
MALPVTALLLPLALLLHAARPEVQLVESGGGLVQPGRSLRLSCTASGFTFTDYYMSWVRQAPGKGLEWVGFIRSKADGYTTEYAASVKGRFTISRDDSKSIAYLQMNSLKTEDTAVYYCARDAAYYSYYSPEGAMDYWGQGTLVTVSSGGGGSGGGGSGGGGSMADYKDIQMTQSPSSVSASVGDRVTITCRASQNVDSAVAWYQQKPGKAPKALIYSASYRYSGVPSRFSGSGSGTDFTLTISSLQPEDFATYYCQQYYSTPWTFGQGTKVEIKREPKSPDKTHTCPPCPAPPVAGPSVFLFPPKPKDTLMIARTPEVTCVVVDVSHEDPEVKFNWYVDGVEVHNAKTKPREEQYNSTYRVVSVLTVLHQDWLNGKEYKCKVSNKALPAPIEKTISKAKGQPREPQVYTLPPSRDELTKNQVSLTCLVKGFYPSDIAVEWESNGQPENNYKTTPPVLDSDGSFFLYSKLTVDKSRWQQGNVFSCSVMHEALHNHYTQKSLSLSPGKIYIWAPLAGTCGVLLLSLVITLYC

SEQ ID NO: 1696 - protein, 531 aa, Artificial Sequence
  source: /note="Description of Artificial Sequence: Synthetic Chimeric Antigen Receptor sequence"
MALPVTALLLPLALLLHAARPEVQLVESGGGLVQPGRSLRLSCTASGFTFTDYYMSWVRQAPGKGLEWVGFIRSKADGYTTEYAASVKGRFTISRDDSKSIAYLQMNSLKTEDTAVYYCARDAAYYSYYSPEGAMDYWGQGTLVTVSSGGGGSGGGGSGGGGSMADYKDIQMTQSPSSVSASVGDRVTITCRASQNVDSAVAWYQQKPGKAPKLLIYSASYGQSGVPSRFSGSGSGTDFTLTISSLQPEDFATYYCQQYYSTPWTFGQGTKVEIKREPKSPDKTHTCPPCPAPPVAGPSVFLFPPKPKDTLMIARTPEVTCVVVDVSHEDPEVKFNWYVDGVEVHNAKTKPREEQYNSTYRVVSVLTVLHQDWLNGKEYKCKVSNKALPAPIEKTISKAKGQPREPQVYTLPPSRDELTKNQVSLTCLVKGFYPSDIAVEWESNGQPENNYKTTPPVLDSDGSFFLYSKLTVDKSRWQQGNVFSCSVMHEALHNHYTQKSLSLSPGKIYIWAPLAGTCGVLLLSLVITLYC

SEQ ID NO: 1697 - protein, 531 aa, Artificial Sequence
  source: /note="Description of Artificial Sequence: Synthetic Chimeric Antigen Receptor sequence"
MALPVTALLLPLALLLHAARPEVQLVESGGGLVQPGRSLRLSCTASGFTFTDYYMSWVRQAPGKGLEWVGFIRSKADGYTTEYAASVKGRFTISRDDSKSIAYLQMNSLKTEDTAVYYCARDAAYYSYYSPEGAMDYWGQGTLVTVSSGGGGSGGGGSGGGGSMADYKDIQMTQSPSSVSASVGDRVTITCRASQNVDSAVAWYQQKPGKAPKLLIYSASYRQSGVPSRFSGSGSGTDFTLTISSLQPEDFATYYCQQYYSTPWTFGQGTKVEIKREPKSPDKTHTCPPCPAPPVAGPSVFLFPPKPKDTLMIARTPEVTCVVVDVSHEDPEVKFNWYVDGVEVHNAKTKPREEQYNSTYRVVSVLTVLHQDWLNGKEYKCKVSNKALPAPIEKTISKAKGQPREPQVYTLPPSRDELTKNQVSLTCLVKGFYPSDIAVEWESNGQPENNYKTTPPVLDSDGSFFLYSKLTVDKSRWQQGNVFSCSVMHEALHNHYTQKSLSLSPGKIYIWAPLAGTCGVLLLSLVITLYC

SEQ ID NO: 1698 - protein, 531 aa, Artificial Sequence
  source: /note="Description of Artificial Sequence: Synthetic Chimeric Antigen Receptor sequence"
MALPVTALLLPLALLLHAARPEVQLVESGGGLVQPGRSLRLSCTASGFTFTDYYMSWVRQAPGKGLEWVGFIRSKADGYTTEYAASVKGRFTISRDDSKSIAYLQMNSLKTEDTAVYYCARDAAYYSYYSPEGAMDYWGQGTLVTVSSGGGGSGGGGSGGGGSMADYKDIQMTQSPSSVSASVGDRVTITCRASQNVDSAVAWYQQKPGKAPKLLIYSASYRYSGVPSRFSGSGSGTDFTLTISSLQPEDFATYYCQQYYSTPWTFGQGTKVEIKREPKSPDKTHTCPPCPAPPVAGPSVFLFPPKPKDTLMIARTPEVTCVVVDVSHEDPEVKFNWYVDGVEVHNAKTKPREEQYNSTYRVVSVLTVLHQDWLNGKEYKCKVSNKALPAPIEKTISKAKGQPREPQVYTLPPSRDELTKNQVSLTCLVKGFYPSDIAVEWESNGQPENNYKTTPPVLDSDGSFFLYSKLTVDKSRWQQGNVFSCSVMHEALHNHYTQKSLSLSPGKIYIWAPLAGTCGVLLLSLVITLYC

SEQ ID NO: 1699 - protein, 531 aa, Artificial Sequence
  source: /note="Description of Artificial Sequence: Synthetic Chimeric Antigen Receptor sequence"
MALPVTALLLPLALLLHAARPEVQLVESGGGLVQPGRSLRLSCTASGFTFTDYYMSWVRQAPGKGLEWVGFIRSKADGYTTEYAASVKGRFTISRDDSKSIAYLQMNSLKTEDTAVYYCARDAAYYSYYSPEGAMDYWGQGTLVTVSSGGGGSGGGGSGGGGSMADYKDIVMTQSPSSVSASVGDRVTITCRASQNVDSAVAWYQQKPGKAPKALIYSASYRYSGVPSRFSGRGSGTDFTLTISSLQPEDFATYYCQQYYSTPWTFGQGTKVEIKREPKSPDKTHTCPPCPAPPVAGPSVFLFPPKPKDTLMIARTPEVTCVVVDVSHEDPEVKFNWYVDGVEVHNAKTKPREEQYNSTYRVVSVLTVLHQDWLNGKEYKCKVSNKALPAPIEKTISKAKGQPREPQVYTLPPSRDELTKNQVSLTCLVKGFYPSDIAVEWESNGQPENNYKTTPPVLDSDGSFFLYSKLTVDKSRWQQGNVFSCSVMHEALHNHYTQKSLSLSPGKIYIWAPLAGTCGVLLLSLVITLYC

SEQ ID NO: 1700 - protein, 531 aa, Artificial Sequence
  source: /note="Description of Artificial Sequence: Synthetic Chimeric Antigen Receptor sequence"
MALPVTALLLPLALLLHAARPEVQLVESGGGLVQPGRSLRLSCTASGFTFTDYYMSWVRQAPGKGLEWVGFIRSKADGYTTEYAASVKGRFTISRDDSKSIAYLQMNSLKTEDTAVYYCTRDAAYYSYYSPEGAMDYWGQGTLVTVSSGGGGSGGGGSGGGGSMADYKDIQMTQSPSSVSASVGDRVTITCRASQNVDSAVAWYQQKPGKAPKALIYSASYRYSGVPSRFSGRGSGTDFTLTISSLQPEDFATYYCQQYYSTPWTFGQGTKVEIKREPKSPDKTHTCPPCPAPPVAGPSVFLFPPKPKDTLMIARTPEVTCVVVDVSHEDPEVKFNWYVDGVEVHNAKTKPREEQYNSTYRVVSVLTVLHQDWLNGKEYKCKVSNKALPAPIEKTISKAKGQPREPQVYTLPPSRDELTKNQVSLTCLVKGFYPSDIAVEWESNGQPENNYKTTPPVLDSDGSFFLYSKLTVDKSRWQQGNVFSCSVMHEALHNHYTQKSLSLSPGKIYIWAPLAGTCGVLLLSLVITLYC

SEQ ID NO: 1701 - protein, 531 aa, Artificial Sequence
  source: /note="Description of Artificial Sequence: Synthetic Chimeric Antigen Receptor sequence"
MALPVTALLLPLALLLHAARPEVQLVESGGGLVQPGRSLRLSCTASGFTFTDYYMSWVRQAPGKGLEWVGFIRSKADGYTTEYAASVKGRFTISRDDSKSIAYLQMNSLKTEDTAVYYCTRDAAYYSYYSPEGAMDYWGQGTLVTVSSGGGGSGGGGSGGGGSMADYKDIQMTQSPSSVSASVGDRVTITCRASQNVDSAVAWYQQKPGKAPKALIYSASYRYSGVPSRFSGSGSGTDFTLTISSLQPEDFATYYCQQYYSTPWTFGQGTKVEIKREPKSPDKTHTCPPCPAPPVAGPSVFLFPPKPKDTLMIARTPEVTCVVVDVSHEDPEVKFNWYVDGVEVHNAKTKPREEQYNSTYRVVSVLTVLHQDWLNGKEYKCKVSNKALPAPIEKTISKAKGQPREPQVYTLPPSRDELTKNQVSLTCLVKGFYPSDIAVEWESNGQPENNYKTTPPVLDSDGSFFLYSKLTVDKSRWQQGNVFSCSVMHEALHNHYTQKSLSLSPGKIYIWAPLAGTCGVLLLSLVITLYC

SEQ ID NO: 1702 - protein, 531 aa, Artificial Sequence
  source: /note="Description of Artificial Sequence: Synthetic Chimeric Antigen Receptor sequence"
MALPVTALLLPLALLLHAARPEVQLVESGGGLVQPGRSLRLSCTASGFTFTDYYMSWVRQAPGKGLEWVGFIRSKADGYTTEYAASVKGRFTISRDDSKSIAYLQMNSLKTEDTAVYYCTRDAAYYSYYSPEGAMDYWGQGTLVTVSSGGGGSGGGGSGGGGSMADYKDIQMTQSPSSVSASVGDRVTITCRASQNVDSAVAWYQQKPGKAPKLLIYSASYGQSGVPSRFSGSGSGTDFTLTISSLQPEDFATYYCQQYYSTPWTFGQGTKVEIKREPKSPDKTHTCPPCPAPPVAGPSVFLFPPKPKDTLMIARTPEVTCVVVDVSHEDPEVKFNWYVDGVEVHNAKTKPREEQYNSTYRVVSVLTVLHQDWLNGKEYKCKVSNKALPAPIEKTISKAKGQPREPQVYTLPPSRDELTKNQVSLTCLVKGFYPSDIAVEWESNGQPENNYKTTPPVLDSDGSFFLYSKLTVDKSRWQQGNVFSCSVMHEALHNHYTQKSLSLSPGKIYIWAPLAGTCGVLLLSLVITLYC

SEQ ID NO: 1703 - protein, 531 aa, Artificial Sequence
  source: /note="Description of Artificial Sequence: Synthetic Chimeric Antigen Receptor sequence"
MALPVTALLLPLALLLHAARPEVQLVESGGGLVQPGRSLRLSCTASGFTFTDYYMSWVRQAPGKGLEWVGFIRSKADGYTTEYAASVKGRFTISRDDSKSIAYLQMNSLKTEDTAVYYCTRDAAYYSYYSPEGAMDYWGQGTLVTVSSGGGGSGGGGSGGGGSMADYKDIQMTQSPSSVSASVGDRVTITCRASQNVDSAVAWYQQKPGKAPKLLIYSASYRQSGVPSRFSGSGSGTDFTLTISSLQPEDFATYYCQQYYSTPWTFGQGTKVEIKREPKSPDKTHTCPPCPAPPVAGPSVFLFPPKPKDTLMIARTPEVTCVVVDVSHEDPEVKFNWYVDGVEVHNAKTKPREEQYNSTYRVVSVLTVLHQDWLNGKEYKCKVSNKALPAPIEKTISKAKGQPREPQVYTLPPSRDELTKNQVSLTCLVKGFYPSDIAVEWESNGQPENNYKTTPPVLDSDGSFFLYSKLTVDKSRWQQGNVFSCSVMHEALHNHYTQKSLSLSPGKIYIWAPLAGTCGVLLLSLVITLYC

SEQ ID NO: 1704 - protein, 531 aa, Artificial Sequence
  source: /note="Description of Artificial Sequence: Synthetic Chimeric Antigen Receptor sequence"
MALPVTALLLPLALLLHAARPEVQLVESGGGLVQPGRSLRLSCTASGFTFTDYYMSWVRQAPGKGLEWVGFIRSKADGYTTEYAASVKGRFTISRDDSKSIAYLQMNSLKTEDTAVYYCTRDAAYYSYYSPEGAMDYWGQGTLVTVSSGGGGSGGGGSGGGGSMADYKDIQMTQSPSSVSASVGDRVTITCRASQNVDSAVAWYQQKPGKAPKLLIYSASYRYSGVPSRFSGSGSGTDFTLTISSLQPEDFATYYCQQYYSTPWTFGQGTKVEIKREPKSPDKTHTCPPCPAPPVAGPSVFLFPPKPKDTLMIARTPEVTCVVVDVSHEDPEVKFNWYVDGVEVHNAKTKPREEQYNSTYRVVSVLTVLHQDWLNGKEYKCKVSNKALPAPIEKTISKAKGQPREPQVYTLPPSRDELTKNQVSLTCLVKGFYPSDIAVEWESNGQPENNYKTTPPVLDSDGSFFLYSKLTVDKSRWQQGNVFSCSVMHEALHNHYTQKSLSLSPGKIYIWAPLAGTCGVLLLSLVITLYC

SEQ ID NO: 1705 - protein, 531 aa, Artificial Sequence
  source: /note="Description of Artificial Sequence: Synthetic Chimeric Antigen Receptor sequence"
MALPVTALLLPLALLLHAARPEVQLVESGGGLVQPGRSLRLSCTASGFTFTDYYMSWVRQAPGKGLEWVGFIRSKADGYTTEYAASVKGRFTISRDDSKSIAYLQMNSLKTEDTAVYYCTRDAAYYSYYSPEGAMDYWGQGTLVTVSSGGGGSGGGGSGGGGSMADYKDIVMTQSPSSVSASVGDRVTITCRASQNVDSAVAWYQQKPGKAPKALIYSASYRYSGVPSRFSGRGSGTDFTLTISSLQPEDFATYYCQQYYSTPWTFGQGTKVEIKREPKSPDKTHTCPPCPAPPVAGPSVFLFPPKPKDTLMIARTPEVTCVVVDVSHEDPEVKFNWYVDGVEVHNAKTKPREEQYNSTYRVVSVLTVLHQDWLNGKEYKCKVSNKALPAPIEKTISKAKGQPREPQVYTLPPSRDELTKNQVSLTCLVKGFYPSDIAVEWESNGQPENNYKTTPPVLDSDGSFFLYSKLTVDKSRWQQGNVFSCSVMHEALHNHYTQKSLSLSPGKIYIWAPLAGTCGVLLLSLVITLYC

SEQ ID NO: 1706 - protein, 531 aa, Artificial Sequence
  source: /note="Description of Artificial Sequence: Synthetic Chimeric Antigen Receptor sequence"
MALPVTALLLPLALLLHAARPEVQLVESGGGLVQPGRSLRLSCTASGFTFTDYYMSWVRQAPGKGLEWVGFIRSKADGYTTEYSASVKGRFTISRDDSKSIAYLQMNSLKTEDTAVYYCARDAAYYSYYSPEGAMDYWGQGTLVTVSSGGGGSGGGGSGGGGSMADYKDIQMTQSPSSVSASVGDRVTITCRASQNVDSAVAWYQQKPGKAPKALIYSASYRYSGVPSRFSGRGSGTDFTLTISSLQPEDFATYYCQQYYSTPWTFGQGTKVEIKREPKSPDKTHTCPPCPAPPVAGPSVFLFPPKPKDTLMIARTPEVTCVVVDVSHEDPEVKFNWYVDGVEVHNAKTKPREEQYNSTYRVVSVLTVLHQDWLNGKEYKCKVSNKALPAPIEKTISKAKGQPREPQVYTLPPSRDELTKNQVSLTCLVKGFYPSDIAVEWESNGQPENNYKTTPPVLDSDGSFFLYSKLTVDKSRWQQGNVFSCSVMHEALHNHYTQKSLSLSPGKIYIWAPLAGTCGVLLLSLVITLYC

SEQ ID NO: 1707 - protein, 531 aa, Artificial Sequence
  source: /note="Description of Artificial Sequence: Synthetic Chimeric Antigen Receptor sequence"
MALPVTALLLPLALLLHAARPEVQLVESGGGLVQPGRSLRLSCTASGFTFTDYYMSWVRQAPGKGLEWVGFIRSKADGYTTEYSASVKGRFTISRDDSKSIAYLQMNSLKTEDTAVYYCARDAAYYSYYSPEGAMDYWGQGTLVTVSSGGGGSGGGGSGGGGSMADYKDIQMTQSPSSVSASVGDRVTITCRASQNVDSAVAWYQQKPGKAPKALIYSASYRYSGVPSRFSGSGSGTDFTLTISSLQPEDFATYYCQQYYSTPWTFGQGTKVEIKREPKSPDKTHTCPPCPAPPVAGPSVFLFPPKPKDTLMIARTPEVTCVVVDVSHEDPEVKFNWYVDGVEVHNAKTKPREEQYNSTYRVVSVLTVLHQDWLNGKEYKCKVSNKALPAPIEKTISKAKGQPREPQVYTLPPSRDELTKNQVSLTCLVKGFYPSDIAVEWESNGQPENNYKTTPPVLDSDGSFFLYSKLTVDKSRWQQGNVFSCSVMHEALHNHYTQKSLSLSPGKIYIWAPLAGTCGVLLLSLVITLYC

SEQ ID NO: 1708 - protein, 531 aa, Artificial Sequence
  source: /note="Description of Artificial Sequence: Synthetic Chimeric Antigen Receptor sequence"
MALPVTALLLPLALLLHAARPEVQLVESGGGLVQPGRSLRLSCTASGFTFTDYYMSWVRQAPGKGLEWVGFIRSKADGYTTEYSASVKGRFTISRDDSKSIAYLQMNSLKTEDTAVYYCARDAAYYSYYSPEGAMDYWGQGTLVTVSSGGGGSGGGGSGGGGSMADYKDIQMTQSPSSVSASVGDRVTITCRASQNVDSAVAWYQQKPGKAPKLLIYSASYGQSGVPSRFSGSGSGTDFTLTISSLQPEDFATYYCQQYYSTPWTFGQGTKVEIKREPKSPDKTHTCPPCPAPPVAGPSVFLFPPKPKDTLMIARTPEVTCVVVDVSHEDPEVKFNWYVDGVEVHNAKTKPREEQYNSTYRVVSVLTVLHQDWLNGKEYKCKVSNKALPAPIEKTISKAKGQPREPQVYTLPPSRDELTKNQVSLTCLVKGFYPSDIAVEWESNGQPENNYKTTPPVLDSDGSFFLYSKLTVDKSRWQQGNVFSCSVMHEALHNHYTQKSLSLSPGKIYIWAPLAGTCGVLLLSLVITLYC

SEQ ID NO: 1709 - protein, 531 aa, Artificial Sequence
  source: /note="Description of Artificial Sequence: Synthetic Chimeric Antigen Receptor sequence"
MALPVTALLLPLALLLHAARPEVQLVESGGGLVQPGRSLRLSCTASGFTFTDYYMSWVRQAPGKGLEWVGFIRSKADGYTTEYSASVKGRFTISRDDSKSIAYLQMNSLKTEDTAVYYCARDAAYYSYYSPEGAMDYWGQGTLVTVSSGGGGSGGGGSGGGGSMADYKDIQMTQSPSSVSASVGDRVTITCRASQNVDSAVAWYQQKPGKAPKLLIYSASYRQSGVPSRFSGSGSGTDFTLTISSLQPEDFATYYCQQYYSTPWTFGQGTKVEIKREPKSPDKTHTCPPCPAPPVAGPSVFLFPPKPKDTLMIARTPEVTCVVVDVSHEDPEVKFNWYVDGVEVHNAKTKPREEQYNSTYRVVSVLTVLHQDWLNGKEYKCKVSNKALPAPIEKTISKAKGQPREPQVYTLPPSRDELTKNQVSLTCLVKGFYPSDIAVEWESNGQPENNYKTTPPVLDSDGSFFLYSKLTVDKSRWQQGNVFSCSVMHEALHNHYTQKSLSLSPGKIYIWAPLAGTCGVLLLSLVITLYC

SEQ ID NO: 1710 - protein, 531 aa, Artificial Sequence
  source: /note="Description of Artificial Sequence: Synthetic Chimeric Antigen Receptor sequence"
MALPVTALLLPLALLLHAARPEVQLVESGGGLVQPGRSLRLSCTASGFTFTDYYMSWVRQAPGKGLEWVGFIRSKADGYTTEYSASVKGRFTISRDDSKSIAYLQMNSLKTEDTAVYYCARDAAYYSYYSPEGAMDYWGQGTLVTVSSGGGGSGGGGSGGGGSMADYKDIQMTQSPSSVSASVGDRVTITCRASQNVDSAVAWYQQKPGKAPKLLIYSASYRYSGVPSRFSGSGSGTDFTLTISSLQPEDFATYYCQQYYSTPWTFGQGTKVEIKREPKSPDKTHTCPPCPAPPVAGPSVFLFPPKPKDTLMIARTPEVTCVVVDVSHEDPEVKFNWYVDGVEVHNAKTKPREEQYNSTYRVVSVLTVLHQDWLNGKEYKCKVSNKALPAPIEKTISKAKGQPREPQVYTLPPSRDELTKNQVSLTCLVKGFYPSDIAVEWESNGQPENNYKTTPPVLDSDGSFFLYSKLTVDKSRWQQGNVFSCSVMHEALHNHYTQKSLSLSPGKIYIWAPLAGTCGVLLLSLVITLYC

SEQ ID NO: 1711 - protein, 531 aa, Artificial Sequence
  source: /note="Description of Artificial Sequence: Synthetic Chimeric Antigen Receptor sequence"
MALPVTALLLPLALLLHAARPEVQLVESGGGLVQPGRSLRLSCTASGFTFTDYYMSWVRQAPGKGLEWVGFIRSKADGYTTEYSASVKGRFTISRDDSKSIAYLQMNSLKTEDTAVYYCARDAAYYSYYSPEGAMDYWGQGTLVTVSSGGGGSGGGGSGGGGSMADYKDIVMTQSPSSVSASVGDRVTITCRASQNVDSAVAWYQQKPGKAPKALIYSASYRYSGVPSRFSGRGSGTDFTLTISSLQPEDFATYYCQQYYSTPWTFGQGTKVEIKREPKSPDKTHTCPPCPAPPVAGPSVFLFPPKPKDTLMIARTPEVTCVVVDVSHEDPEVKFNWYVDGVEVHNAKTKPREEQYNSTYRVVSVLTVLHQDWLNGKEYKCKVSNKALPAPIEKTISKAKGQPREPQVYTLPPSRDELTKNQVSLTCLVKGFYPSDIAVEWESNGQPENNYKTTPPVLDSDGSFFLYSKLTVDKSRWQQGNVFSCSVMHEALHNHYTQKSLSLSPGKIYIWAPLAGTCGVLLLSLVITLYC

SEQ ID NO: 1712 - protein, 531 aa, Artificial Sequence
  source: /note="Description of Artificial Sequence: Synthetic Chimeric Antigen Receptor sequence"
MALPVTALLLPLALLLHAARPEVQLVESGGGLVQPGRSLRLSCTASGFTFTDYYMSWVRQAPGKGLEWVGLIRSKADGYTTEYAASVKGRFTISRDDSKSIAYLQMNSLKTEDTAVYYCARDAAYYSYYSPEGAMDYWGQGTLVTVSSGGGGSGGGGSGGGGSMADYKDIQMTQSPSSVSASVGDRVTITCRASQNVDSAVAWYQQKPGKAPKALIYSASYRYSGVPSRFSGRGSGTDFTLTISSLQPEDFATYYCQQYYSTPWTFGQGTKVEIKREPKSPDKTHTCPPCPAPPVAGPSVFLFPPKPKDTLMIARTPEVTCVVVDVSHEDPEVKFNWYVDGVEVHNAKTKPREEQYNSTYRVVSVLTVLHQDWLNGKEYKCKVSNKALPAPIEKTISKAKGQPREPQVYTLPPSRDELTKNQVSLTCLVKGFYPSDIAVEWESNGQPENNYKTTPPVLDSDGSFFLYSKLTVDKSRWQQGNVFSCSVMHEALHNHYTQKSLSLSPGKIYIWAPLAGTCGVLLLSLVITLYC

SEQ ID NO: 1713 - protein, 531 aa, Artificial Sequence
  source: /note="Description of Artificial Sequence: Synthetic Chimeric Antigen Receptor sequence"
MALPVTALLLPLALLLHAARPEVQLVESGGGLVQPGRSLRLSCTASGFTFTDYYMSWVRQAPGKGLEWVGLIRSKADGYTTEYAASVKGRFTISRDDSKSIAYLQMNSLKTEDTAVYYCARDAAYYSYYSPEGAMDYWGQGTLVTVSSGGGGSGGGGSGGGGSMADYKDIQMTQSPSSVSASVGDRVTITCRASQNVDSAVAWYQQKPGKAPKALIYSASYRYSGVPSRFSGSGSGTDFTLTISSLQPEDFATYYCQQYYSTPWTFGQGTKVEIKREPKSPDKTHTCPPCPAPPVAGPSVFLFPPKPKDTLMIARTPEVTCVVVDVSHEDPEVKFNWYVDGVEVHNAKTKPREEQYNSTYRVVSVLTVLHQDWLNGKEYKCKVSNKALPAPIEKTISKAKGQPREPQVYTLPPSRDELTKNQVSLTCLVKGFYPSDIAVEWESNGQPENNYKTTPPVLDSDGSFFLYSKLTVDKSRWQQGNVFSCSVMHEALHNHYTQKSLSLSPGKIYIWAPLAGTCGVLLLSLVITLYC

SEQ ID NO: 1714 - protein, 531 aa, Artificial Sequence
  source: /note="Description of Artificial Sequence: Synthetic Chimeric Antigen Receptor sequence"
MALPVTALLLPLALLLHAARPEVQLVESGGGLVQPGRSLRLSCTASGFTFTDYYMSWVRQAPGKGLEWVGLIRSKADGYTTEYAASVKGRFTISRDDSKSIAYLQMNSLKTEDTAVYYCARDAAYYSYYSPEGAMDYWGQGTLVTVSSGGGGSGGGGSGGGGSMADYKDIQMTQSPSSVSASVGDRVTITCRASQNVDSAVAWYQQKPGKAPKLLIYSASYGQSGVPSRFSGSGSGTDFTLTISSLQPEDFATYYCQQYYSTPWTFGQGTKVEIKREPKSPDKTHTCPPCPAPPVAGPSVFLFPPKPKDTLMIARTPEVTCVVVDVSHEDPEVKFNWYVDGVEVHNAKTKPREEQYNSTYRVVSVLTVLHQDWLNGKEYKCKVSNKALPAPIEKTISKAKGQPREPQVYTLPPSRDELTKNQVSLTCLVKGFYPSDIAVEWESNGQPENNYKTTPPVLDSDGSFFLYSKLTVDKSRWQQGNVFSCSVMHEALHNHYTQKSLSLSPGKIYIWAPLAGTCGVLLLSLVITLYC

SEQ ID NO: 1715 - protein, 531 aa, Artificial Sequence
  source: /note="Description of Artificial Sequence: Synthetic Chimeric Antigen Receptor sequence"
MALPVTALLLPLALLLHAARPEVQLVESGGGLVQPGRSLRLSCTASGFTFTDYYMSWVRQAPGKGLEWVGLIRSKADGYTTEYAASVKGRFTISRDDSKSIAYLQMNSLKTEDTAVYYCARDAAYYSYYSPEGAMDYWGQGTLVTVSSGGGGSGGGGSGGGGSMADYKDIQMTQSPSSVSASVGDRVTITCRASQNVDSAVAWYQQKPGKAPKLLIYSASYRQSGVPSRFSGSGSGTDFTLTISSLQPEDFATYYCQQYYSTPWTFGQGTKVEIKREPKSPDKTHTCPPCPAPPVAGPSVFLFPPKPKDTLMIARTPEVTCVVVDVSHEDPEVKFNWYVDGVEVHNAKTKPREEQYNSTYRVVSVLTVLHQDWLNGKEYKCKVSNKALPAPIEKTISKAKGQPREPQVYTLPPSRDELTKNQVSLTCLVKGFYPSDIAVEWESNGQPENNYKTTPPVLDSDGSFFLYSKLTVDKSRWQQGNVFSCSVMHEALHNHYTQKSLSLSPGKIYIWAPLAGTCGVLLLSLVITLYC

SEQ ID NO: 1716 - protein, 531 aa, Artificial Sequence
  source: /note="Description of Artificial Sequence: Synthetic Chimeric Antigen Receptor sequence"
MALPVTALLLPLALLLHAARPEVQLVESGGGLVQPGRSLRLSCTASGFTFTDYYMSWVRQAPGKGLEWVGLIRSKADGYTTEYAASVKGRFTISRDDSKSIAYLQMNSLKTEDTAVYYCARDAAYYSYYSPEGAMDYWGQGTLVTVSSGGGGSGGGGSGGGGSMADYKDIQMTQSPSSVSASVGDRVTITCRASQNVDSAVAWYQQKPGKAPKLLIYSASYRYSGVPSRFSGSGSGTDFTLTISSLQPEDFATYYCQQYYSTPWTFGQGTKVEIKREPKSPDKTHTCPPCPAPPVAGPSVFLFPPKPKDTLMIARTPEVTCVVVDVSHEDPEVKFNWYVDGVEVHNAKTKPREEQYNSTYRVVSVLTVLHQDWLNGKEYKCKVSNKALPAPIEKTISKAKGQPREPQVYTLPPSRDELTKNQVSLTCLVKGFYPSDIAVEWESNGQPENNYKTTPPVLDSDGSFFLYSKLTVDKSRWQQGNVFSCSVMHEALHNHYTQKSLSLSPGKIYIWAPLAGTCGVLLLSLVITLYC

SEQ ID NO: 1717 - protein, 531 aa, Artificial Sequence
  source: /note="Description of Artificial Sequence: Synthetic Chimeric Antigen Receptor sequence"
MALPVTALLLPLALLLHAARPEVQLVESGGGLVQPGRSLRLSCTASGFTFTDYYMSWVRQAPGKGLEWVGLIRSKADGYTTEYAASVKGRFTISRDDSKSIAYLQMNSLKTEDTAVYYCARDAAYYSYYSPEGAMDYWGQGTLVTVSSGGGGSGGGGSGGGGSMADYKDIVMTQSPSSVSASVGDRVTITCRASQNVDSAVAWYQQKPGKAPKALIYSASYRYSGVPSRFSGRGSGTDFTLTISSLQPEDFATYYCQQYYSTPWTFGQGTKVEIKREPKSPDKTHTCPPCPAPPVAGPSVFLFPPKPKDTLMIARTPEVTCVVVDVSHEDPEVKFNWYVDGVEVHNAKTKPREEQYNSTYRVVSVLTVLHQDWLNGKEYKCKVSNKALPAPIEKTISKAKGQPREPQVYTLPPSRDELTKNQVSLTCLVKGFYPSDIAVEWESNGQPENNYKTTPPVLDSDGSFFLYSKLTVDKSRWQQGNVFSCSVMHEALHNHYTQKSLSLSPGKIYIWAPLAGTCGVLLLSLVITLYC

SEQ ID NO: 1718 - protein, 531 aa, Artificial Sequence
  source: /note="Description of Artificial Sequence: Synthetic Chimeric Antigen Receptor sequence"
MALPVTALLLPLALLLHAARPEVQLVESGGGLVQPGRSLRLSCTASGFTFTDYYMSWVRQAPGKGLEWVGLIRSKADGYTTEYSASVKGRFTISRDDSKSIAYLQMNSLKTEDTAVYYCARDAAYYSYYSPEGAMDYWGQGTLVTVSSGGGGSGGGGSGGGGSMADYKDIQMTQSPSSVSASVGDRVTITCRASQNVDSAVAWYQQKPGKAPKALIYSASYRYSGVPSRFSGRGSGTDFTLTISSLQPEDFATYYCQQYYSTPWTFGQGTKVEIKREPKSPDKTHTCPPCPAPPVAGPSVFLFPPKPKDTLMIARTPEVTCVVVDVSHEDPEVKFNWYVDGVEVHNAKTKPREEQYNSTYRVVSVLTVLHQDWLNGKEYKCKVSNKALPAPIEKTISKAKGQPREPQVYTLPPSRDELTKNQVSLTCLVKGFYPSDIAVEWESNGQPENNYKTTPPVLDSDGSFFLYSKLTVDKSRWQQGNVFSCSVMHEALHNHYTQKSLSLSPGKIYIWAPLAGTCGVLLLSLVITLYC

SEQ ID NO: 1719 - protein, 531 aa, Artificial Sequence
  source: /note="Description of Artificial Sequence: Synthetic Chimeric Antigen Receptor sequence"
MALPVTALLLPLALLLHAARPEVQLVESGGGLVQPGRSLRLSCTASGFTFTDYYMSWVRQAPGKGLEWVGLIRSKADGYTTEYSASVKGRFTISRDDSKSIAYLQMNSLKTEDTAVYYCARDAAYYSYYSPEGAMDYWGQGTLVTVSSGGGGSGGGGSGGGGSMADYKDIQMTQSPSSVSASVGDRVTITCRASQNVDSAVAWYQQKPGKAPKALIYSASYRYSGVPSRFSGSGSGTDFTLTISSLQPEDFATYYCQQYYSTPWTFGQGTKVEIKREPKSPDKTHTCPPCPAPPVAGPSVFLFPPKPKDTLMIARTPEVTCVVVDVSHEDPEVKFNWYVDGVEVHNAKTKPREEQYNSTYRVVSVLTVLHQDWLNGKEYKCKVSNKALPAPIEKTISKAKGQPREPQVYTLPPSRDELTKNQVSLTCLVKGFYPSDIAVEWESNGQPENNYKTTPPVLDSDGSFFLYSKLTVDKSRWQQGNVFSCSVMHEALHNHYTQKSLSLSPGKIYIWAPLAGTCGVLLLSLVITLYC

SEQ ID NO: 1720 - protein, 531 aa, Artificial Sequence
  source: /note="Description of Artificial Sequence: Synthetic Chimeric Antigen Receptor sequence"
MALPVTALLLPLALLLHAARPEVQLVESGGGLVQPGRSLRLSCTASGFTFTDYYMSWVRQAPGKGLEWVGLIRSKADGYTTEYSASVKGRFTISRDDSKSIAYLQMNSLKTEDTAVYYCARDAAYYSYYSPEGAMDYWGQGTLVTVSSGGGGSGGGGSGGGGSMADYKDIQMTQSPSSVSASVGDRVTITCRASQNVDSAVAWYQQKPGKAPKLLIYSASYGQSGVPSRFSGSGSGTDFTLTISSLQPEDFATYYCQQYYSTPWTFGQGTKVEIKREPKSPDKTHTCPPCPAPPVAGPSVFLFPPKPKDTLMIARTPEVTCVVVDVSHEDPEVKFNWYVDGVEVHNAKTKPREEQYNSTYRVVSVLTVLHQDWLNGKEYKCKVSNKALPAPIEKTISKAKGQPREPQVYTLPPSRDELTKNQVSLTCLVKGFYPSDIAVEWESNGQPENNYKTTPPVLDSDGSFFLYSKLTVDKSRWQQGNVFSCSVMHEALHNHYTQKSLSLSPGKIYIWAPLAGTCGVLLLSLVITLYC

SEQ ID NO: 1721 - protein, 531 aa, Artificial Sequence
  source: /note="Description of Artificial Sequence: Synthetic Chimeric Antigen Receptor sequence"
MALPVTALLLPLALLLHAARPEVQLVESGGGLVQPGRSLRLSCTASGFTFTDYYMSWVRQAPGKGLEWVGLIRSKADGYTTEYSASVKGRFTISRDDSKSIAYLQMNSLKTEDTAVYYCARDAAYYSYYSPEGAMDYWGQGTLVTVSSGGGGSGGGGSGGGGSMADYKDIQMTQSPSSVSASVGDRVTITCRASQNVDSAVAWYQQKPGKAPKLLIYSASYRQSGVPSRFSGSGSGTDFTLTISSLQPEDFATYYCQQYYSTPWTFGQGTKVEIKREPKSPDKTHTCPPCPAPPVAGPSVFLFPPKPKDTLMIARTPEVTCVVVDVSHEDPEVKFNWYVDGVEVHNAKTKPREEQYNSTYRVVSVLTVLHQDWLNGKEYKCKVSNKALPAPIEKTISKAKGQPREPQVYTLPPSRDELTKNQVSLTCLVKGFYPSDIAVEWESNGQPENNYKTTPPVLDSDGSFFLYSKLTVDKSRWQQGNVFSCSVMHEALHNHYTQKSLSLSPGKIYIWAPLAGTCGVLLLSLVITLYC

SEQ ID NO: 1722 - protein, 531 aa, Artificial Sequence
  source: /note="Description of Artificial Sequence: Synthetic Chimeric Antigen Receptor sequence"
MALPVTALLLPLALLLHAARPEVQLVESGGGLVQPGRSLRLSCTASGFTFTDYYMSWVRQAPGKGLEWVGLIRSKADGYTTEYSASVKGRFTISRDDSKSIAYLQMNSLKTEDTAVYYCARDAAYYSYYSPEGAMDYWGQGTLVTVSSGGGGSGGGGSGGGGSMADYKDIQMTQSPSSVSASVGDRVTITCRASQNVDSAVAWYQQKPGKAPKLLIYSASYRYSGVPSRFSGSGSGTDFTLTISSLQPEDFATYYCQQYYSTPWTFGQGTKVEIKREPKSPDKTHTCPPCPAPPVAGPSVFLFPPKPKDTLMIARTPEVTCVVVDVSHEDPEVKFNWYVDGVEVHNAKTKPREEQYNSTYRVVSVLTVLHQDWLNGKEYKCKVSNKALPAPIEKTISKAKGQPREPQVYTLPPSRDELTKNQVSLTCLVKGFYPSDIAVEWESNGQPENNYKTTPPVLDSDGSFFLYSKLTVDKSRWQQGNVFSCSVMHEALHNHYTQKSLSLSPGKIYIWAPLAGTCGVLLLSLVITLYC

SEQ ID NO: 1723 - protein, 531 aa, Artificial Sequence
  source: /note="Description of Artificial Sequence: Synthetic Chimeric Antigen Receptor sequence"
MALPVTALLLPLALLLHAARPEVQLVESGGGLVQPGRSLRLSCTASGFTFTDYYMSWVRQAPGKGLEWVGLIRSKADGYTTEYSASVKGRFTISRDDSKSIAYLQMNSLKTEDTAVYYCARDAAYYSYYSPEGAMDYWGQGTLVTVSSGGGGSGGGGSGGGGSMADYKDIVMTQSPSSVSASVGDRVTITCRASQNVDSAVAWYQQKPGKAPKALIYSASYRYSGVPSRFSGRGSGTDFTLTISSLQPEDFATYYCQQYYSTPWTFGQGTKVEIKREPKSPDKTHTCPPCPAPPVAGPSVFLFPPKPKDTLMIARTPEVTCVVVDVSHEDPEVKFNWYVDGVEVHNAKTKPREEQYNSTYRVVSVLTVLHQDWLNGKEYKCKVSNKALPAPIEKTISKAKGQPREPQVYTLPPSRDELTKNQVSLTCLVKGFYPSDIAVEWESNGQPENNYKTTPPVLDSDGSFFLYSKLTVDKSRWQQGNVFSCSVMHEALHNHYTQKSLSLSPGKIYIWAPLAGTCGVLLLSLVITLYC

SEQ ID NO: 1724 - protein, 531 aa, Artificial Sequence
  source: /note="Description of Artificial Sequence: Synthetic Chimeric Antigen Receptor sequence"
MALPVTALLLPLALLLHAARPEVQLVESGGGLVQPGRSLRLSCTASGFTFTDYYMSWVRQAPGKGLEWVGLIRSKADGYTTEYSASVKGRFTISRDDSKSILYLQMNSLKTEDTAVYYCARDAAYYSYYSPEGAMDYWGQGTLVTVSSGGGGSGGGGSGGGGSMADYKDIQMTQSPSSVSASVGDRVTITCRASQNVDSAVAWYQQKPGKAPKALIYSASYRYSGVPSRFSGRGSGTDFTLTISSLQPEDFATYYCQQYYSTPWTFGQGTKVEIKREPKSPDKTHTCPPCPAPPVAGPSVFLFPPKPKDTLMIARTPEVTCVVVDVSHEDPEVKFNWYVDGVEVHNAKTKPREEQYNSTYRVVSVLTVLHQDWLNGKEYKCKVSNKALPAPIEKTISKAKGQPREPQVYTLPPSRDELTKNQVSLTCLVKGFYPSDIAVEWESNGQPENNYKTTPPVLDSDGSFFLYSKLTVDKSRWQQGNVFSCSVMHEALHNHYTQKSLSLSPGKIYIWAPLAGTCGVLLLSLVITLYC

SEQ ID NO: 1725 - protein, 531 aa, Artificial Sequence
  source: /note="Description of Artificial Sequence: Synthetic Chimeric Antigen Receptor sequence"
MALPVTALLLPLALLLHAARPEVQLVESGGGLVQPGRSLRLSCTASGFTFTDYYMSWVRQAPGKGLEWVGLIRSKADGYTTEYSASVKGRFTISRDDSKSILYLQMNSLKTEDTAVYYCARDAAYYSYYSPEGAMDYWGQGTLVTVSSGGGGSGGGGSGGGGSMADYKDIQMTQSPSSVSASVGDRVTITCRASQNVDSAVAWYQQKPGKAPKALIYSASYRYSGVPSRFSGSGSGTDFTLTISSLQPEDFATYYCQQYYSTPWTFGQGTKVEIKREPKSPDKTHTCPPCPAPPVAGPSVFLFPPKPKDTLMIARTPEVTCVVVDVSHEDPEVKFNWYVDGVEVHNAKTKPREEQYNSTYRVVSVLTVLHQDWLNGKEYKCKVSNKALPAPIEKTISKAKGQPREPQVYTLPPSRDELTKNQVSLTCLVKGFYPSDIAVEWESNGQPENNYKTTPPVLDSDGSFFLYSKLTVDKSRWQQGNVFSCSVMHEALHNHYTQKSLSLSPGKIYIWAPLAGTCGVLLLSLVITLYC

SEQ ID NO: 1726 - protein, 531 aa, Artificial Sequence
  source: /note="Description of Artificial Sequence: Synthetic Chimeric Antigen Receptor sequence"
MALPVTALLLPLALLLHAARPEVQLVESGGGLVQPGRSLRLSCTASGFTFTDYYMSWVRQAPGKGLEWVGLIRSKADGYTTEYSASVKGRFTISRDDSKSILYLQMNSLKTEDTAVYYCARDAAYYSYYSPEGAMDYWGQGTLVTVSSGGGGSGGGGSGGGGSMADYKDIQMTQSPSSVSASVGDRVTITCRASQNVDSAVAWYQQKPGKAPKLLIYSASYGQSGVPSRFSGSGSGTDFTLTISSLQPEDFATYYCQQYYSTPWTFGQGTKVEIKREPKSPDKTHTCPPCPAPPVAGPSVFLFPPKPKDTLMIARTPEVTCVVVDVSHEDPEVKFNWYVDGVEVHNAKTKPREEQYNSTYRVVSVLTVLHQDWLNGKEYKCKVSNKALPAPIEKTISKAKGQPREPQVYTLPPSRDELTKNQVSLTCLVKGFYPSDIAVEWESNGQPENNYKTTPPVLDSDGSFFLYSKLTVDKSRWQQGNVFSCSVMHEALHNHYTQKSLSLSPGKIYIWAPLAGTCGVLLLSLVITLYC

SEQ ID NO: 1727 - protein, 531 aa, Artificial Sequence
  source: /note="Description of Artificial Sequence: Synthetic Chimeric Antigen Receptor sequence"
MALPVTALLLPLALLLHAARPEVQLVESGGGLVQPGRSLRLSCTASGFTFTDYYMSWVRQAPGKGLEWVGLIRSKADGYTTEYSASVKGRFTISRDDSKSILYLQMNSLKTEDTAVYYCARDAAYYSYYSPEGAMDYWGQGTLVTVSSGGGGSGGGGSGGGGSMADYKDIQMTQSPSSVSASVGDRVTITCRASQNVDSAVAWYQQKPGKAPKLLIYSASYRQSGVPSRFSGSGSGTDFTLTISSLQPEDFATYYCQQYYSTPWTFGQGTKVEIKREPKSPDKTHTCPPCPAPPVAGPSVFLFPPKPKDTLMIARTPEVTCVVVDVSHEDPEVKFNWYVDGVEVHNAKTKPREEQYNSTYRVVSVLTVLHQDWLNGKEYKCKVSNKALPAPIEKTISKAKGQPREPQVYTLPPSRDELTKNQVSLTCLVKGFYPSDIAVEWESNGQPENNYKTTPPVLDSDGSFFLYSKLTVDKSRWQQGNVFSCSVMHEALHNHYTQKSLSLSPGKIYIWAPLAGTCGVLLLSLVITLYC

SEQ ID NO: 1728 - protein, 531 aa, Artificial Sequence
  source: /note="Description of Artificial Sequence: Synthetic Chimeric Antigen Receptor sequence"
MALPVTALLLPLALLLHAARPEVQLVESGGGLVQPGRSLRLSCTASGFTFTDYYMSWVRQAPGKGLEWVGLIRSKADGYTTEYSASVKGRFTISRDDSKSILYLQMNSLKTEDTAVYYCARDAAYYSYYSPEGAMDYWGQGTLVTVSSGGGGSGGGGSGGGGSMADYKDIQMTQSPSSVSASVGDRVTITCRASQNVDSAVAWYQQKPGKAPKLLIYSASYRYSGVPSRFSGSGSGTDFTLTISSLQPEDFATYYCQQYYSTPWTFGQGTKVEIKREPKSPDKTHTCPPCPAPPVAGPSVFLFPPKPKDTLMIARTPEVTCVVVDVSHEDPEVKFNWYVDGVEVHNAKTKPREEQYNSTYRVVSVLTVLHQDWLNGKEYKCKVSNKALPAPIEKTISKAKGQPREPQVYTLPPSRDELTKNQVSLTCLVKGFYPSDIAVEWESNGQPENNYKTTPPVLDSDGSFFLYSKLTVDKSRWQQGNVFSCSVMHEALHNHYTQKSLSLSPGKIYIWAPLAGTCGVLLLSLVITLYC

SEQ ID NO: 1729 - protein, 531 aa, Artificial Sequence
  source: /note="Description of Artificial Sequence: Synthetic Chimeric Antigen Receptor sequence"
MALPVTALLLPLALLLHAARPEVQLVESGGGLVQPGRSLRLSCTASGFTFTDYYMSWVRQAPGKGLEWVGLIRSKADGYTTEYSASVKGRFTISRDDSKSILYLQMNSLKTEDTAVYYCARDAAYYSYYSPEGAMDYWGQGTLVTVSSGGGGSGGGGSGGGGSMADYKDIVMTQSPSSVSASVGDRVTITCRASQNVDSAVAWYQQKPGKAPKALIYSASYRYSGVPSRFSGRGSGTDFTLTISSLQPEDFATYYCQQYYSTPWTFGQGTKVEIKREPKSPDKTHTCPPCPAPPVAGPSVFLFPPKPKDTLMIARTPEVTCVVVDVSHEDPEVKFNWYVDGVEVHNAKTKPREEQYNSTYRVVSVLTVLHQDWLNGKEYKCKVSNKALPAPIEKTISKAKGQPREPQVYTLPPSRDELTKNQVSLTCLVKGFYPSDIAVEWESNGQPENNYKTTPPVLDSDGSFFLYSKLTVDKSRWQQGNVFSCSVMHEALHNHYTQKSLSLSPGKIYIWAPLAGTCGVLLLSLVITLYC

SEQ ID NO: 1730 - protein, 532 aa, Artificial Sequence
  source: /note="Description of Artificial Sequence: Synthetic Chimeric Antigen Receptor sequence"
MALPVTALLLPLALLLHAARPQIQLVQSGPELKKPGETVKISCKASGYIFTNYGMNWVKQAPGKSFKWMGWINTYTGESTYSADFKGRFAFSLETSASTAYLHINDLKNEDTATYFCARSGGYDPMDYWGQGTSVTVSSGGGGSGGGGSGGGGSDIVLTQSPASLAVSLGQRATISCRASESVDNYGNTFMHWYQQKPGQPPKLLIYRASNLESGIPARFSGSGSRTDFTLTINPVEADDVATYYCQQSNEDPPTFGAGTKLELKRSDPGSGGGGSCPYSNPSLCSGGGGSCPYSNPSLCSGGGGSAPTTTPAPRPPTPAPTIASQPLSLRPEACRPAAGGAVHTRGLDFACDIYIWAPLAGTCGVLLLSLVITLYCRRGRKKLLYIFKQPFMRPVQTTQEEDGCSCRFPEEEEGGCELRVKFSRSADAPAYQQGQNQLYNELNLGRREEYDVLDKRRGRDPEMGGKPRRKNPQEGLYNELQKDKMAEAYSEIGMKGERRRGKGHDGLYQGLSTATKDTYDALHMQALPPRE

SEQ ID NO: 1731 - protein, 646 aa, Artificial Sequence
  source: /note="Description of Artificial Sequence: Synthetic Chimeric Antigen Receptor sequence"
QVQLQQPGAELVRPGASVKLSCKASGYTFTSYWMNWVKQRPDQGLEWIGRIDPYDSETHYNQKFKDKAILTVDKSSSTAYMQLSSLTSEDSAVYYCARGNWDDYWGQGTTLTVSSGGGGSGGGGSGGGGSDVQITQSPSYLAASPGETITINCRASKSISKDLAWYQEKPGKTNKLLIYSGSTLQSGIPSRFSGSGSGTDFTLTISSLEPEDFAMYYCQQHNKYPYTFGGGTKLEIKEPKSPDKTHTCPPCPAPPVAGPSVFLFPPKPKDTLMIARTPEVTCVVVDVSHEDPEVKFNWYVDGVEVHNAKTKPREEQYNSTYRVVSVLTVLHQDWLNGKEYKCKVSNKALPAPIEKTISKAKGQPREPQVYTLPPSRDELTKNQVSLTCLVKGFYPSDIAVEWESNGQPENNYKTTPPVLDSDGSFFLYSKLTVDKSRWQQGNVFSCSVMHEALHNHYTQKSLSLSPGKIYIWAPLAGTCGVLLLSLVITLYCKRGRKKLLYIFKQPFMRPVQTTQEEDGCSCRFPEEEEGGCELRVKFSRSADAPAYQQGQNQLYNELNLGRREEYDVLDKRRGRDPEMGGKPRRKNPQEGLYNELQKDKMAEAYSEIGMKGERRRGKGHDGLYQGLSTATKDTYDALHMQALPPR

SEQ ID NO: 1732 - protein, 649 aa, Artificial Sequence
  source: /note="Description of Artificial Sequence: Synthetic Chimeric Antigen Receptor sequence"
QVQLQQPGAELVRPGASVKLSCKASGYTFTSYWMNWVKQRPDQGLEWIGRIDPYDSETHYNQKFKDKAILTVDKSSSTAYMQLSSLTSEDSAVYYCARGNWDDYWGQGTTLTVSSGGGGSGGGGSGGGGSDVQITQSPSYLAASPGETITINCRASKSISKDLAWYQEKPGKTNKLLIYSGSTLQSGIPSRFSGSGSGTDFTLTISSLEPEDFAMYYCQQHNKYPYTFGGGTKLEIKEPKSPDKTHTCPPCPAPPVAGPSVFLFPPKPKDTLMIARTPEVTCVVVDVSHEDPEVKFNWYVDGVEVHNAKTKPREEQYNSTYRVVSVLTVLHQDWLNGKEYKCKVSNKALPAPIEKTISKAKGQPREPQVYTLPPSRDELTKNQVSLTCLVKGFYPSDIAVEWESNGQPENNYKTTPPVLDSDGSFFLYSKLTVDKSRWQQGNVFSCSVMHEALHNHYTQKSLSLSPGKIISFFLALTSTALLFLLFFLTLRFSVVKRGRKKLLYIFKQPFMRPVQTTQEEDGCSCRFPEEEEGGCELRVKFSRSADAPAYQQGQNQLYNELNLGRREEYDVLDKRRGRDPEMGGKPRRKNPQEGLYNELQKDKMAEAYSEIGMKGERRRGKGHDGLYQGLSTATKDTYDALHMQALPPR

SEQ ID NO: 1733 - protein, 653 aa, Artificial Sequence
  source: /note="Description of Artificial Sequence: Synthetic Chimeric Antigen Receptor sequence"
QIQLVQSGPELKKPGETVKISCKASGYIFTNYGMNWVKQAPGKSFKWMGWINTYTGESTYSADFKGRFAFSLETSASTAYLHINDLKNEDTATYFCARSGGYDPMDYWGQGTSVTVSSGGGGSGGGGSGGGGSDIVLTQSPASLAVSLGQRATISCRASESVDNYGNTFMHWYQQKPGQPPKLLIYRASNLESGIPARFSGSGSRTDFTLTINPVEADDVATYYCQQSNEDPPTFGAGTKLELKEPKSPDKTHTCPPCPAPPVAGPSVFLFPPKPKDTLMIARTPEVTCVVVDVSHEDPEVKFNWYVDGVEVHNAKTKPREEQYNSTYRVVSVLTVLHQDWLNGKEYKCKVSNKALPAPIEKTISKAKGQPREPQVYTLPPSRDELTKNQVSLTCLVKGFYPSDIAVEWESNGQPENNYKTTPPVLDSDGSFFLYSKLTVDKSRWQQGNVFSCSVMHEALHNHYTQKSLSLSPGKIYIWAPLAGTCGVLLLSLVITLYCKRGRKKLLYIFKQPFMRPVQTTQEEDGCSCRFPEEEEGGCELRVKFSRSADAPAYQQGQNQLYNELNLGRREEYDVLDKRRGRDPEMGGKPRRKNPQEGLYNELQKDKMAEAYSEIGMKGERRRGKGHDGLYQGLSTATKDTYDALHMQALPPR

SEQ ID NO: 1734 - protein, 656 aa, Artificial Sequence
  source: /note="Description of Artificial Sequence: Synthetic Chimeric Antigen Receptor sequence"
QIQLVQSGPELKKPGETVKISCKASGYIFTNYGMNWVKQAPGKSFKWMGWINTYTGESTYSADFKGRFAFSLETSASTAYLHINDLKNEDTATYFCARSGGYDPMDYWGQGTSVTVSSGGGGSGGGGSGGGGSDIVLTQSPASLAVSLGQRATISCRASESVDNYGNTFMHWYQQKPGQPPKLLIYRASNLESGIPARFSGSGSRTDFTLTINPVEADDVATYYCQQSNEDPPTFGAGTKLELKEPKSPDKTHTCPPCPAPPVAGPSVFLFPPKPKDTLMIARTPEVTCVVVDVSHEDPEVKFNWYVDGVEVHNAKTKPREEQYNSTYRVVSVLTVLHQDWLNGKEYKCKVSNKALPAPIEKTISKAKGQPREPQVYTLPPSRDELTKNQVSLTCLVKGFYPSDIAVEWESNGQPENNYKTTPPVLDSDGSFFLYSKLTVDKSRWQQGNVFSCSVMHEALHNHYTQKSLSLSPGKIISFFLALTSTALLFLLFFLTLRFSVVKRGRKKLLYIFKQPFMRPVQTTQEEDGCSCRFPEEEEGGCELRVKFSRSADAPAYQQGQNQLYNELNLGRREEYDVLDKRRGRDPEMGGKPRRKNPQEGLYNELQKDKMAEAYSEIGMKGERRRGKGHDGLYQGLSTATKDTYDALHMQALPPR

SEQ ID NO: 1735 - protein, 657 aa, Artificial Sequence
  source: /note="Description of Artificial Sequence: Synthetic Chimeric Antigen Receptor sequence"
EVQLVESGGGLVQPGRSLRLSCTASGFTFTDYYMSWVRQAPGKGLEWVGLIRSKADGYTTEYAASVKGRFTISRDDSQSIAYLQMNSLKTEDTAVYYCARDAAYYSYYSPEGAMDYGQGTLVTVSSGGGGSGGGGSGGGGSDIQMTQSPSSVSASVGDRVTITCKASQVDSAVAWYQQKPGKAPKALIYSASYRYSGVPDRFSGSGSGTDFTLTISSLQPEDLATYYCQQYYSTPWTFGQGTKVEIKREPKSPDKTHTCPPCPAPPVAGPSVFLFPPKPKDTLMIARTPEVTCVVVDVSHEDPEVKFNWYVDGVEVHNAKTKPREEQYNSTYRVVSVLTVLHQDWLNGKEYKCKVSNKALPAPIEKTISKAKGQPREPQVYTLPPSRDELTKNQVSLTCLVKGFYPSDIAVEWESNGQPENNYKTTPPVLDSDGSFFLYSKLTVDKSRWQQGNVFSCSVMHEALHNHYTQKSLSLSPGKIYIWAPLAGTCGVLLLSLVITLYCKRGRKKLLYIFKQPFMRPVQTTQEEDGCSCRFPEEEEGGCELRVKFSRSADAPAYQQGQNQLYNELNLGRREEYDVLDKRRGRDPEMGGKPRRKNPQEGLYNELQKDKMAEAYSEIGMKGERRRGKGHDGLYQGLSTATKDTYDALHMQALPPR

SEQ ID NO: 1736 - protein, 657 aa, Artificial Sequence
  source: /note="Description of Artificial Sequence: Synthetic Chimeric Antigen Receptor sequence"
EVQLVESGGGLVQPGRSLRLSCTASGFTFTDYYMSWVRQAPGKGLEWVGLIRSKADGYTTEYAASVKGRFTISRDDSQSIAYLQMNSLKTEDTAVYYCARDAAYYSYYSPEGAMDYGQGTLVTVSSGGGGSGGGGSGGGGSDIQMTQSPSSVSASVGDRVTITCRASQVDSAVAWYQQKPGKAPKALIYSASYRYSGVPSRFSGSGSGTDFTLTISSLQPEDFATYYCQQYYSTPWTFGQGTKVEIKREPKSPDKTHTCPPCPAPPVAGPSVFLFPPKPKDTLMIARTPEVTCVVVDVSHEDPEVKFNWYVDGVEVHNAKTKPREEQYNSTYRVVSVLTVLHQDWLNGKEYKCKVSNKALPAPIEKTISKAKGQPREPQVYTLPPSRDELTKNQVSLTCLVKGFYPSDIAVEWESNGQPENNYKTTPPVLDSDGSFFLYSKLTVDKSRWQQGNVFSCSVMHEALHNHYTQKSLSLSPGKIYIWAPLAGTCGVLLLSLVITLYCKRGRKKLLYIFKQPFMRPVQTTQEEDGCSCRFPEEEEGGCELRVKFSRSADAPAYQQGQNQLYNELNLGRREEYDVLDKRRGRDPEMGGKPRRKNPQEGLYNELQKDKMAEAYSEIGMKGERRRGKGHDGLYQGLSTATKDTYDALHMQALPPR

SEQ ID NO: 1737 - protein, 657 aa, Artificial Sequence
  source: /note="Description of Artificial Sequence: Synthetic Chimeric Antigen Receptor sequence"
EVQLVESGGGLVQPGRSLRLSCTASGFTFTDYYMSWVRQAPGKGLEWVGLIRSKADGYTTEYAASVKGRFTISRDDSQSIAYLQMNSLKTEDTAVYYCARDAAYYSYYSPEGAMDYGQGTLVTVSSGGGGSGGGGSGGGGSDIVMTQSPSSVSASVGDRVTITCRASQNVDSAVAYQQKPGKAPKALIYSASYRYSGVPSRFSGRGSGTDFTLTISSLQPEDFATYYCQQYYSTPWTFGQGTKVEIKREPKSPDKTHTCPPCPAPPVAGPSVFLFPPKPKDTLMIARTPEVTCVVVDVSHEDPEVKFNWYVDGVEVHNAKTKPREEQYNSTYRVVSVLTVLHQDWLNGKEYKCKVSNKALPAPIEKTISKAKGQPREPQVYTLPPSRDELTKNQVSLTCLVKGFYPSDIAVEWESNGQPENNYKTTPPVLDSDGSFFLYSKLTVDKSRWQQGNVFSCSVMHEALHNHYTQKSLSLSPGKIYIWAPLAGTCGVLLLSLVITLYCKRGRKKLLYIFKQPFMRPVQTTQEEDGCSCRFPEEEEGGCELRVKFSRSADAPAYQQGQNQLYNELNLGRREEYDVLDKRRGRDPEMGGKPRRKNPQEGLYNELQKDKMAEAYSEIGMKGERRRGKGHDGLYQGLSTATKDTYDALHMQALPPR

SEQ ID NO: 1738 - protein, 657 aa, Artificial Sequence
  source: /note="Description of Artificial Sequence: Synthetic Chimeric Antigen Receptor sequence"
EVQLVESGGGLVQPGRSLRLSCTASGFTFTDYYMSWVRQAPGKGLEWVGLIRSKADGYTTEYSASVKGRFTISRDDSKSILYLQMNSLKTEDTAVYYCARDAAYYSYYSPEGAMDYGQGTLVTVSSGGGGSGGGGSGGGGSDIQMTQSPSSVSASVGDRVTITCRASQVDSAVAWYQQKPGKAPKALIYSASYRYSGVPSRFSGSGSGTDFTLTISSLQPEDFATYYCQQYYSTPWTFGQGTKVEIKREPKSPDKTHTCPPCPAPPVAGPSVFLFPPKPKDTLMIARTPEVTCVVVDVSHEDPEVKFNWYVDGVEVHNAKTKPREEQYNSTYRVVSVLTVLHQDWLNGKEYKCKVSNKALPAPIEKTISKAKGQPREPQVYTLPPSRDELTKNQVSLTCLVKGFYPSDIAVEWESNGQPENNYKTTPPVLDSDGSFFLYSKLTVDKSRWQQGNVFSCSVMHEALHNHYTQKSLSLSPGKIYIWAPLAGTCGVLLLSLVITLYCKRGRKKLLYIFKQPFMRPVQTTQEEDGCSCRFPEEEEGGCELRVKFSRSADAPAYQQGQNQLYNELNLGRREEYDVLDKRRGRDPEMGGKPRRKNPQEGLYNELQKDKMAEAYSEIGMKGERRRGKGHDGLYQGLSTATKDTYDALHMQALPPR

SEQ ID NO: 1739 - protein, 657 aa, Artificial Sequence
  source: /note="Description of Artificial Sequence: Synthetic Chimeric Antigen Receptor sequence"
EVQLVESGGGLVQPGRSLRLSCTASGFTFTDYYMSWVRQAPGKGLEWVGLIRSKADGYTTEYSASVKGRFTISRDDSKSILYLQMNSLKTEDTAVYYCARDAAYYSYYSPEGAMDYWGQGTLVTVSSGGGGSGGGGSGGGGSDIVMTQSPSSVSASVGDRVTITCRASQNVDSAVAWYQQKPGKAPKALIYSASYRYSGVPSRFSGRGSGTDFTLTISSLQPEDFATYYCQQYYSTPWTFGQGTKVEIKREPKSPDKTHTCPPCPAPPVAGPSVFLFPPKPKDTLMIARTPEVTCWVDVSHEDPEVKFNWYVDGVEVHNAKTKPREEQYNSTYRWSVLTVLHQDWLNGKEYKCKVSNKALPAPIEKTISKAKGQPREPQVYTLPPSRDELTKNQVSLTCLVKGFYPSDIAVEWESNGQPENNYKTTPPVLDSDGSFFLYSKLTVDKSRWQQGNVFSCSVMHEALHNHYTQKSLSLSPGKIYIWAPLAGTCGVLLLSLVITLYCKRGRKKLLYIFKQPFMRPVQTTQEEDGCSCRFPEEEEGGCELRVKFSRSADAPAYQQGQNQLYNELNLGRREEYDVLDKRRGRDPEMGGKPRRKNPQEGLYNELQKDKMAEAYSEIGMKGERRRGKGHDGLYQGLSTATKDTYDALHMQALPPR

SEQ ID NO: 1740 - protein, 657 aa, Artificial Sequence
  source: /note="Description of Artificial Sequence: Synthetic Chimeric Antigen Receptor sequence"
EVQLVESGGGLVQPGRSLRLSCTASGFTFTDYYMSWVRQAPGKGLEWVGLIRSKADGYTTEYSASVKGRFTISRDDSQSIAYLQMNSLKTEDTAVYYCARDAAYYSYYSPEGAMDYGQGTLVTVSSGGGGSGGGGSGGGGSDIQMTQSPSSVSASVGDRVTITCKASQVDSAVAWYQQKPGKAPKLLIYSASYRYSGVPSRFSGSGSGTDFTLTISSLQPEDFATYYCQQYYSTPWTFGQGTKVEIKREPKSPDKTHTCPPCPAPPVAGPSVFLFPPKPKDTLMIARTPEVTCVVVDVSHEDPEVKFNWYVDGVEVHNAKTKPREEQYNSTYRVVSVLTVLHQDWLNGKEYKCKVSNKALPAPIEKTISKAKGQPREPQVYTLPPSRDELTKNQVSLTCLVKGFYPSDIAVEWESNGQPENNYKTTPPVLDSDGSFFLYSKLTVDKSRWQQGNVFSCSVMHEALHNHYTQKSLSLSPGKIYIWAPLAGTCGVLLLSLVITLYCKRGRKKLLYIFKQPFMRPVQTTQEEDGCSCRFPEEEEGGCELRVKFSRSADAPAYQQGQNQLYNELNLGRREEYDVLDKRRGRDPEMGGKPRRKNPQEGLYNELQKDKMAEAYSEIGMKGERRRGKGHDGLYQGLSTATKDTYDALHMQALPPR

SEQ ID NO: 1741 - protein, 657 aa, Artificial Sequence
  source: /note="Description of Artificial Sequence: Synthetic Chimeric Antigen Receptor sequence"
EVQLVESGGGLVQPGRSLRLSCTASGFTFTDYYMSWVRQAPGKGLEWVGLIRSKADGYTTEYSASVKGRFTISRDDSQSIAYLQMNSLKTEDTAVYYCARDAAYYSYYSPEGAMDYGQGTLVTVSSGGGGSGGGGSGGGGSDIQMTQSPSSVSASVGDRVTITCRASQVDSAVAWYQQKPGKAPKALIYSASYRYSGVPSRFSGSGSGTDFTLTISSLQPEDFATYYCQQYYSTPWTFGQGTKVEIKREPKSPDKTHTCPPCPAPPVAGPSVFLFPPKPKDTLMIARTPEVTCVVVDVSHEDPEVKFNWYVDGVEVHNAKTKPREEQYNSTYRVVSVLTVLHQDWLNGKEYKCKVSNKALPAPIEKTISKAKGQPREPQVYTLPPSRDELTKNQVSLTCLVKGFYPSDIAVEWESNGQPENNYKTTPPVLDSDGSFFLYSKLTVDKSRWQQGNVFSCSVMHEALHNHYTQKSLSLSPGKIYIWAPLAGTCGVLLLSLVITLYCKRGRKKLLYIFKQPFMRPVQTTQEEDGCSCRFPEEEEGGCELRVKFSRSADAPAYQQGQNQLYNELNLGRREEYDVLDKRRGRDPEMGGKPRRKNPQEGLYNELQKDKMAEAYSEIGMKGERRRGKGHDGLYQGLSTATKDTYDALHMQALPPR

SEQ ID NO: 1742 - protein, 657 aa, Artificial Sequence
  source: /note="Description of Artificial Sequence: Synthetic Chimeric Antigen Receptor sequence"
EVQLVESGGGLVQPGRSLRLSCTASGFTFTDYYMSWVRQAPGKGLEWVGLIRSKADGYTTEYSASVKGRFTISRDDSQSIAYLQMNSLKTEDTAVYYCARDAAYYSYYSPEGAMDYGQGTLVTVSSGGGGSGGGGSGGGGSDIQMTQSPSSVSASVGDRVTITCRASQVDSAVAWYQQKPGKAPKALIYSASYRYSGVPSRFSGSGSGTDFTLTISSLQPEDLATYYCQQYYSTPWTFGQGTKVEIKREPKSPDKTHTCPPCPAPPVAGPSVFLFPPKPKDTLMIARTPEVTCVVVDVSHEDPEVKFNWYVDGVEVHNAKTKPREEQYNSTYRVVSVLTVLHQDWLNGKEYKCKVSNKALPAPIEKTISKAKGQPREPQVYTLPPSRDELTKNQVSLTCLVKGFYPSDIAVEWESNGQPENNYKTTPPVLDSDGSFFLYSKLTVDKSRWQQGNVFSCSVMHEALHNHYTQKSLSLSPGKIYIWAPLAGTCGVLLLSLVITLYCKRGRKKLLYIFKQPFMRPVQTTQEEDGCSCRFPEEEEGGCELRVKFSRSADAPAYQQGQNQLYNELNLGRREEYDVLDKRRGRDPEMGGKPRRKNPQEGLYNELQKDKMAEAYSEIGMKGERRRGKGHDGLYQGLSTATKDTYDALHMQALPPR

SEQ ID NO: 1743 - protein, 664 aa, Artificial Sequence
  source: /note="Description of Artificial Sequence: Synthetic Chimeric Antigen Receptor sequence"
EVKLVESGGGLVQPGGSLSLSCAASGFTFTDYYMSWVRQPPGKALEWLALIRSKADGYTTEYSASVKGRFTLSRDDSQSILYLQMNALRPEDSATYYCARDAAYYSYYSPEGAMDYWGQGTSVTVSSGGGGSGGGGSGGGGSMADYKDIVMTQSHKFMSTSVGDRVNITCKASQNVDSAVAWYQQKPGQSPKALIYSASYRYSGVPDRFTGRGSGTDFTLTISSVQAEDLAVYYCQQYYSTPWTFGGGTKLEIKREPKSPDKTHTCPPCPAPPVAGPSVFLFPPKPKDTLMIARTPEVTCVVVDVSHEDPEVKFNWYVDGVEVHNAKTKPREEQYNSTYRVVSVLTVLHQDWLNGKEYKCKVSNKALPAPIEKTISKAKGQPREPQVYTLPPSRDELTKNQVSLTCLVKGFYPSDIAVEWESNGQPENNYKTTPPVLDSDGSFFLYSKLTVDKSRWQQGNVFSCSVMHEALHNHYTQKSLSLSPGKIYIWAPLAGTCGVLLLSLVITLYCKRGRKKLLYIFKQPFMRPVQTTQEEDGCSCRFPEEEEGGCELRVKFSRSADAPAYQQGQNQLYNELNLGRREEYDVLDKRRGRDPEMGGKPRRKNPQEGLYNELQKDKMAEAYSEIGMKGERRRGKGHDGLYQGLSTATKDTYDALHMQALPPR

SEQ ID NO: 1744 - protein, 667 aa, Artificial Sequence
  source: /note="Description of Artificial Sequence: Synthetic Chimeric Antigen Receptor sequence"
EVKLVESGGGLVQPGGSLSLSCAASGFTFTDYYMSWVRQPPGKALEWLALIRSKADGYTTEYSASVKGRFTLSRDDSQSILYLQMNALRPEDSATYYCARDAAYYSYYSPEGAMDYWGQGTSVTVSSGGGGSGGGGSGGGGSMADYKDIVMTQSHKFMSTSVGDRVNITCKASQNVDSAVAWYQQKPGQSPKALIYSASYRYSGVPDRFTGRGSGTDFTLTISSVQAEDLAVYYCQQYYSTPWTFGGGTKLEIKREPKSPDKTHTCPPCPAPPVAGPSVFLFPPKPKDTLMIARTPEVTCVVVDVSHEDPEVKFNWYVDGVEVHNAKTKPREEQYNSTYRVVSVLTVLHQDWLNGKEYKCKVSNKALPAPIEKTISKAKGQPREPQVYTLPPSRDELTKNQVSLTCLVKGFYPSDIAVEWESNGQPENNYKTTPPVLDSDGSFFLYSKLTVDKSRWQQGNVFSCSVMHEALHNHYTQKSLSLSPGKIISFFLALTSTALLFLLFFLTLRFSVVKRGRKKLLYIFKQPFMRPVQTTQEEDGCSCRFPEEEEGGCELRVKFSRSADAPAYQQGQNQLYNELNLGRREEYDVLDKRRGRDPEMGGKPRRKNPQEGLYNELQKDKMAEAYSEIGMKGERRRGKGHDGLYQGLSTATKDTYDALHMQALPPR

SEQ ID NO: 1745 - protein, 672 aa, Artificial Sequence
  source: /note="Description of Artificial Sequence: Synthetic Chimeric Antigen Receptor sequence"
MLLLVTSLLLCELPHPAFLLIPQVQLQQPGAELVRPGASVKLSCKASGYTFTSYWMNWVKQRPDQGLEWIGRIDPYDSETHYNQKFKDKAILTVDKSSSTAYMQLSSLTSEDSAVYYCARGNWDDYWGQGTTLTVSSGGGGSGGGGSGGGGSDVQITQSPSYLAASPGETITINCRASKSISKDLAWYQEKPGKTNKLLIYSGSTLQSGIPSRFSGSGSGTDFTLTISSLEPEDFAMYYCQQHNKYPYTFGGGTKLEIKESKYGPPCPPCPAPEFEGGPSVFLFPPKPKDTLMISRTPEVTCVVVDVSQEDPEVQFNWYVDGVEVHNAKTKPREEQFNSTYRVVSVLTVLHQDWLNGKEYKCKVSNKGLPSSIEKTISKAKGQPREPQVYTLPPSQEEMTKNQVSLTCLVKGFYPSDIAVEWESNGQPENNYKTTPPVLDSDGSFFLYSRLTVDKSRWQEGNVFSCSVMHEALHNHYTQKSLSLSLGKMFWVLVVVGGVLACYSLLVTVAFIIFWVRSKRSRGGHSDYMNMTPRRPGPTRKHYQPYAPPRDFAAYRSGGGRVKFSRSADAPAYQQGQNQLYNELNLGRREEYDVLDKRRGRDPEMGGKPRRKNPQEGLYNELQKDKMAEAYSEIGMKGERRRGKGHDGLYQGLSTATKDTYDALHMQALPPR

SEQ ID NO: 1746 - protein, 672 aa, Artificial Sequence
  source: /note="Description of Artificial Sequence: Synthetic Chimeric Antigen Receptor sequence"
MLLLVTSLLLCELPHPAFLLIPQVQLQQPGAELVRPGASVKLSCKASGYTFTSYWMNWVKQRPDQGLEWIGRIDPYDSETHYNQKFKDKAILTVDKSSSTAYMQLSSLTSEDSAVYYCARGNWDDYWGQGTTLTVSSGGGGSGGGGSGGGGSDVQITQSPSYLAASPGETITINCRASKSISKDLAWYQEKPGKTNKLLIYSGSTLQSGIPSRFSGSGSGTDFTLTISSLEPEDFAMYYCQQHNKYPYTFGGGTKLEIKESKYGPPCPPCPAPEFEGGPSVFLFPPKPKDTLMISRTPEVTCVVVDVSQEDPEVQFNWYVDGVEVHNAKTKPREEQFQSTYRVVSVLTVLHQDWLNGKEYKCKVSNKGLPSSIEKTISKAKGQPREPQVYTLPPSQEEMTKNQVSLTCLVKGFYPSDIAVEWESNGQPENNYKTTPPVLDSDGSFFLYSRLTVDKSRWQEGNVFSCSVMHEALHNHYTQKSLSLSLGKMFWVLVVVGGVLACYSLLVTVAFIIFWVRSKRSRGGHSDYMNMTPRRPGPTRKHYQPYAPPRDFAAYRSGGGRVKFSRSADAPAYQQGQNQLYNELNLGRREEYDVLDKRRGRDPEMGGKPRRKNPQEGLYNELQKDKMAEAYSEIGMKGERRRGKGHDGLYQGLSTATKDTYDALHMQALPPR

SEQ ID NO: 1747 - protein, 679 aa, Artificial Sequence
  source: /note="Description of Artificial Sequence: Synthetic Chimeric Antigen Receptor sequence"
MLLLVTSLLLCELPHPAFLLIPQIQLVQSGPELKKPGETVKISCKASGYIFTNYGMNWVKQAPGKSFKWMGWINTYTGESTYSADFKGRFAFSLETSASTAYLHINDLKNEDTATYFCARSGGYDPMDYWGQGTSVTVSSGGGGSGGGGSGGGGSDIVLTQSPASLAVSLGQRATISCRASESVDNYGNTFMHWYQQKPGQPPKLLIYRASNLESGIPARFSGSGSRTDFTLTINPVEADDVATYYCQQSNEDPPTFGAGTKLELKESKYGPPCPPCPAPEFEGGPSVFLFPPKPKDTLMISRTPEVTCVVVDVSQEDPEVQFNWYVDGVEVHNAKTKPREEQFNSTYRVVSVLTVLHQDWLNGKEYKCKVSNKGLPSSIEKTISKAKGQPREPQVYTLPPSQEEMTKNQVSLTCLVKGFYPSDIAVEWESNGQPENNYKTTPPVLDSDGSFFLYSRLTVDKSRWQEGNVFSCSVMHEALHNHYTQKSLSLSLGKMFWVLVVVGGVLACYSLLVTVAFIIFWVRSKRSRGGHSDYMNMTPRRPGPTRKHYQPYAPPRDFAAYRSGGGRVKFSRSADAPAYQQGQNQLYNELNLGRREEYDVLDKRRGRDPEMGGKPRRKNPQEGLYNELQKDKMAEAYSEIGMKGERRRGKGHDGLYQGLSTATKDTYDALHMQALPPR

SEQ ID NO: 1748 - protein, 679 aa, Artificial Sequence
  source: /note="Description of Artificial Sequence: Synthetic Chimeric Antigen Receptor sequence"
MLLLVTSLLLCELPHPAFLLIPQIQLVQSGPELKKPGETVKISCKASGYIFTNYGMNWVKQAPGKSFKWMGWINTYTGESTYSADFKGRFAFSLETSASTAYLHINDLKNEDTATYFCARSGGYDPMDYWGQGTSVTVSSGGGGSGGGGSGGGGSDIVLTQSPASLAVSLGQRATISCRASESVDNYGNTFMHWYQQKPGQPPKLLIYRASNLESGIPARFSGSGSRTDFTLTINPVEADDVATYYCQQSNEDPPTFGAGTKLELKESKYGPPCPPCPAPEFEGGPSVFLFPPKPKDTLMISRTPEVTCVVVDVSQEDPEVQFNWYVDGVEVHNAKTKPREEQFQSTYRVVSVLTVLHQDWLNGKEYKCKVSNKGLPSSIEKTISKAKGQPREPQVYTLPPSQEEMTKNQVSLTCLVKGFYPSDIAVEWESNGQPENNYKTTPPVLDSDGSFFLYSRLTVDKSRWQEGNVFSCSVMHEALHNHYTQKSLSLSLGKMFWVLVVVGGVLACYSLLVTVAFIIFWVRSKRSRGGHSDYMNMTPRRPGPTRKHYQPYAPPRDFAAYRSGGGRVKFSRSADAPAYQQGQNQLYNELNLGRREEYDVLDKRRGRDPEMGGKPRRKNPQEGLYNELQKDKMAEAYSEIGMKGERRRGKGHDGLYQGLSTATKDTYDALHMQALPPR

SEQ ID NO: 1749 - protein, 685 aa, Artificial Sequence
  source: /note="Description of Artificial Sequence: Synthetic Chimeric Antigen Receptor sequence"
MALPVTALLLPLALLLHAARPEVKLVESGGGLVQPGGSLSLSCAASGFTFTDYYMSWVRQPPGKALEWLALIRSKADGYTTEYSASVKGRFTLSRDDSQSILYLQMNALRPEDSATYYCARDAAYYSYYSPEGAMDYWGQGTSVTVSSGGGGSGGGGSGGGGSMADYKDIVMTQSHKFMSTSVGDRVNITCKASQNVDSAVAWYQQKPGQSPKALIYSASYRYSGVPDRFTGRGSGTDFTLTISSVQAEDLAVYYCQQYYSTPWTFGGGTKLEIKREPKSPDKTHTCPPCPAPPVAGPSVFLFPPKPKDTLMIARTPEVTCVVVDVSHEDPEVKFNWYVDGVEVHNAKTKPREEQYNSTYRVVSVLTVLHQDWLNGKEYKCKVSNKALPAPIEKTISKAKGQPREPQVYTLPPSRDELTKNQVSLTCLVKGFYPSDIAVEWESNGQPENNYKTTPPVLDSDGSFFLYSKLTVDKSRWQQGNVFSCSVMHEALHNHYTQKSLSLSPGKIYIWAPLAGTCGVLLLSLVITLYCKRGRKKLLYIFKQPFMRPVQTTQEEDGCSCRFPEEEEGGCELRVKFSRSADAPAYQQGQNQLYNELNLGRREEYDVLDKRRGRDPEMGGKPRRKNPQEGLYNELQKDKMAEAYSEIGMKGERRRGKGHDGLYQGLSTATKDTYDALHMQALPPR

SEQ ID NO: 1750 - protein, 699 aa, Artificial Sequence
  source: /note="Description of Artificial Sequence: Synthetic Chimeric Antigen Receptor sequence"
MGWSWIFLFLVSGTGGVLSEVQLQQSGPELVKPGASVKMSCKASGYTFTDYYMKWVKQSHGKSLEWIGDIIPSNGATFYNQKFKGKATLTVDRSSSTAYMHLNSLTSEDSAVYYCTRSHLLRASWFAYWGQGTLVTVSAASGGGGSGGGGSGGGGSMESQTQVLMSLLFWVSGTCGDFVMTQSPSSLTVTAGEKVTMSCKSSQSLLNSGNQKNYLTWYLQKPGQPPKLLIYWASTRESGVPDRFTGSGSGTDFTLTISSVQAEDLAVYYCQNDYSYPYTFGGGTKLEIKREPKSPDKTHTCPPCPAPPVAGPSVFLFPPKPKDTLMIARTPEVTCVVVDVSHEDPEVKFNWYVDGVEVHNAKTKPREEQYNSTYRVVSVLTVLHQDWLNGKEYKCKVSNKALPAPIEKTISKAKGQPREPQVYTLPPSRDELTKNQVSLTCLVKGFYPSDIAVEWESNGQPENNYKTTPPVLDSDGSFFLYSKLTVDKSRWQQGNVFSCSVMHEALHNHYTQKSLSLSPGKIYIWAPLAGTCGVLLLSLVITLYCKRGRKKLLYIFKQPFMRPVQTTQEEDGCSCRFPEEEEGGCELRVKFSRSADAPAYQQGQNQLYNELNLGRREEYDVLDKRRGRDPEMGGKPRRKNPQEGLYNELQKDKMAEAYSEIGMKGERRRGKGHDGLYQGLSTATKDTYDALHMQALPPR

SEQ ID NO: 1751 - protein, 702 aa, Artificial Sequence
  source: /note="Description of Artificial Sequence: Synthetic Chimeric Antigen Receptor sequence"
MGWSWIFLFLVSGTGGVLSEVQLQQSGPELVKPGASVKMSCKASGYTFTDYYMKWVKQSHGKSLEWIGDIIPSNGATFYNQKFKGKATLTVDRSSSTAYMHLNSLTSEDSAVYYCTRSHLLRASWFAYWGQGTLVTVSAASGGGGSGGGGSGGGGSMESQTQVLMSLLFWVSGTCGDFVMTQSPSSLTVTAGEKVTMSCKSSQSLLNSGNQKNYLTWYLQKPGQPPKLLIYWASTRESGVPDRFTGSGSGTDFTLTISSVQAEDLAVYYCQNDYSYPYTFGGGTKLEIKREPKSPDKTHTCPPCPAPPVAGPSVFLFPPKPKDTLMIARTPEVTCVVVDVSHEDPEVKFNWYVDGVEVHNAKTKPREEQYNSTYRVVSVLTVLHQDWLNGKEYKCKVSNKALPAPIEKTISKAKGQPREPQVYTLPPSRDELTKNQVSLTCLVKGFYPSDIAVEWESNGQPENNYKTTPPVLDSDGSFFLYSKLTVDKSRWQQGNVFSCSVMHEALHNHYTQKSLSLSPGKIISFFLALTSTALLFLLFFLTLRFSVVKRGRKKLLYIFKQPFMRPVQTTQEEDGCSCRFPEEEEGGCELRVKFSRSADAPAYQQGQNQLYNELNLGRREEYDVLDKRRGRDPEMGGKPRRKNPQEGLYNELQKDKMAEAYSEIGMKGERRRGKGHDGLYQGLSTATKDTYDALHMQALPPR

SEQ ID NO: 1752 - protein, 487 aa, Artificial Sequence
  source: /note="Description of Artificial Sequence: Synthetic Chimeric Antigen Receptor sequence"
MALPVTALLLPLALLLHAARPQVQLVQSGAEVKKPGASVKVSCKASGYTFTGYYMHWVRQAPGQGLEWMGWINPNSGGTNYAQKFQGRVTMTRDTSISTAYMELSRLRSDDTAVYYCARDMNILATVPFDIWGQGTMVTVSSGGGGSGGGGSGGGGSDIQMTQSPSSLSASVGDRVTITCRASQSISTYLNWYQQKPGKAPNLLIYAAFSLQSGVPSRFSGSGSGTDFTLTINSLQPEDFATYYCQQGDSVPLTFGGGTKLEIKTTTPAPRPPTPAPTIASQPLSLRPEACRPAAGGAVHTRGLDFACDIYIWAPLAGTCGVLLLSLVITLYCKRGRKKLLYIFKQPFMRPVQTTQEEDGCSCRFPEEEEGGCELRVKFSRSADAPAYKQGQNQLYNELNLGRREEYDVLDKRRGRDPEMGGKPRRKNPQEGLYNELQKDKMAEAYSEIGMKGERRRGKGHDGLYQGLSTATKDTYDALHMQALPPR

SEQ ID NO: 1753 - protein, 487 aa, Artificial Sequence
  source: /note="Description of Artificial Sequence: Synthetic Chimeric Antigen Receptor sequence"
MALPVTALLLPLALLLHAARPQVQLVQSGAEVKKPGASVKVSCKASGYTFTGYYMHWVRQAPGQGLEWMGWINPNSGGTNYAQKFQGRVTLTRDTSISTVYMELSRLRSDDTAVYYCARDMNILATVPFDIWGQGTMVTVSSGGGGSGGGGSGGGGSDIQMTQSPSSLSASVGDRVTITCRASQSISSYLNWYQQKPGKAPKLLIYAASSLQSGVPSRFSGSGSGTDFTLTVNSLQPEDFATYYCQQGDSVPLTFGGGTRLEIKTTTPAPRPPTPAPTIASQPLSLRPEACRPAAGGAVHTRGLDFACDIYIWAPLAGTCGVLLLSLVITLYCKRGRKKLLYIFKQPFMRPVQTTQEEDGCSCRFPEEEEGGCELRVKFSRSADAPAYKQGQNQLYNELNLGRREEYDVLDKRRGRDPEMGGKPRRKNPQEGLYNELQKDKMAEAYSEIGMKGERRRGKGHDGLYQGLSTATKDTYDALHMQALPPR

SEQ ID NO: 1754 - protein, 487 aa, Artificial Sequence
  source: /note="Description of Artificial Sequence: Synthetic Chimeric Antigen Receptor sequence"
MALPVTALLLPLALLLHAARPQVQLVQSGAEVKKPGASVKVSCKASGYIFTGYYIHWVRQAPGQGLEWMGWINPNSGGTNYAQKFQGRVTMTRDTSISTAYMELSGLRSDDPAVYYCARDMNILATVPFDIWGQGTLVTVSSGGGGSGGGGSGGGGSDIQLTQSPSSLSASVGDRVTITCRASQSISSYLNWYQQKPGKAPKLLIYAASSLQSGVPSRFSGSGSGTDFTLTVNSLQPEDFATYYCQQGDSVPLTFGGGTKVEIKTTTPAPRPPTPAPTIASQPLSLRPEACRPAAGGAVHTRGLDFACDIYIWAPLAGTCGVLLLSLVITLYCKRGRKKLLYIFKQPFMRPVQTTQEEDGCSCRFPEEEEGGCELRVKFSRSADAPAYKQGQNQLYNELNLGRREEYDVLDKRRGRDPEMGGKPRRKNPQEGLYNELQKDKMAEAYSEIGMKGERRRGKGHDGLYQGLSTATKDTYDALHMQALPPR

SEQ ID NO: 1755 - protein, 336 aa, Artificial Sequence
  source: /note="Description of Artificial Sequence: Synthetic Chimeric Antigen Receptor sequence"
MALPVTALLLPLALLLHAARPQVQLQQSGAEVKKSGASVKVSCKASGYTFTDYYMHWLRQAPGQGLEWMGWINPNSGDTNYAQKFQGRVTLTRDTSISTVYMELSRLRSDDTAVYYCARDMNILATVPFDIWGQGTMVTVSSASGGGGSGGRASGGGGSDIQMTQSPSSLSASVGDRVTITCRASQSISSYLNWYQQKPGKAPKLLIYAASSLQSGVPSRFSGSGSGTDFTLTISSLQPEDFATYYCQQGDSVPLTFGGGTKVEIKTTTPAPRPPTPAPTIASQPLSLRPEACRPAAGGAVHTRGLDFACDIYIWAPLAGTCGVLLLSLVITLYCK

SEQ ID NO: 1756 - protein, 486 aa, Artificial Sequence
  source: /note="Description of Artificial Sequence: Synthetic Chimeric Antigen Receptor sequence"
MALPVTALLLPLALLLHAARPEIVMTQSPATLSLSPGERATLSCRASQDISKYLNWYQQKPGQAPRLLIYHTSRLHSGIPARFSGSGSGTDYTLTISSLQPEDFAVYFCQQGNTLPYTFGQGTKLEIKGGGGSGGGGSGGGGSQVQLQESGPGLVKPSETLSLTCTVSGVSLPDYGVSWIRQPPGKGLEWIGVIWGSETTYYSSSLKSRVTISKDNSKNQVSLKLSSVTAADTAVYYCAKHYYYGGSYAMDYWGQGTLVTVSSTTTPAPRPPTPAPTIASQPLSLRPEACRPAAGGAVHTRGLDFACDIYIWAPLAGTCGVLLLSLVITLYCKRGRKKLLYIFKQPFMRPVQTTQEEDGCSCRFPEEEEGGCELRVKFSRSADAPAYKQGQNQLYNELNLGRREEYDVLDKRRGRDPEMGGKPRRKNPQEGLYNELQKDKMAEAYSEIGMKGERRRGKGHDGLYQGLSTATKDTYDALHMQALPPR

SEQ ID NO: 1757 - protein, 486 aa, Artificial Sequence
  source: /note="Description of Artificial Sequence: Synthetic Chimeric Antigen Receptor sequence"
MALPVTALLLPLALLLHAARPDIQMTQTTSSLSASLGDRVTISCRASQDISKYLNWYQQKPDGTVKLLIYHTSRLHSGVPSRFSGSGSGTDYSLTISNLEQEDIATYFCQQGNTLPYTFGGGTKLEITGGGGSGGGGSGGGGSEVKLQESGPGLVAPSQSLSVTCTVSGVSLPDYGVSWIRQPPRKGLEWLGVIWGSETTYYNSALKSRLTIIKDNSKSQVFLKMNSLQTDDTAIYYCAKHYYYGGSYAMDYWGQGTSVTVSSTTTPAPRPPTPAPTIASQPLSLRPEACRPAAGGAVHTRGLDFACDIYIWAPLAGTCGVLLLSLVITLYCKRGRKKLLYIFKQPFMRPVQTTQEEDGCSCRFPEEEEGGCELRVKFSRSADAPAYKQGQNQLYNELNLGRREEYDVLDKRRGRDPEMGGKPRRKNPQEGLYNELQKDKMAEAYSEIGMKGERRRGKGHDGLYQGLSTATKDTYDALHMQALPPR

SEQ ID NO: 1758 - protein, 276 aa, Artificial Sequence
  source: /note="Description of Artificial Sequence: Synthetic polypeptide"
MALPVTALLLPLALLLHAARPEIVMTQSPATLSLSPGERATLSCRASQDISKYLNWYQQKPGQAPRLLIYHTSRLHSGIPARFSGSGSGTDYTLTISSLQPEDFAVYFCQQGNTLPYTFGQGTKLEIKGGGGSGGGGSGGGGSGGGGSQVQLQESGPGLVKPSETLSLTCTVSGVSLPDYGVSWIRQPPGKGLEWIGVIWGSETTYYNSSLKSRVTISKDNSKNQVSLKLSSVTAADTAVYYCAKHYYYGGSYAMDYWGQGTLVTVSSHHHHHHHH

SEQ ID NO: 1759 - protein, 276 aa, Artificial Sequence
  source: /note="Description of Artificial Sequence: Synthetic polypeptide"
MALPVTALLLPLALLLHAARPQVQLQESGPGLVKPSETLSLTCTVSGVSLPDYGVSWIRQPPGKGLEWIGVIWGSETTYYNSSLKSRVTISKDNSKNQVSLKLSSVTAADTAVYYCAKHYYYGGSYAMDYWGQGTLVTVSSGGGGSGGGGSGGGGSGGGGSEIVMTQSPATLSLSPGERATLSCRASQDISKYLNWYQQKPGQAPRLLIYHTSRLHSGIPARFSGSGSGTDYTLTISSLQPEDFAVYFCQQGNTLPYTFGQGTKLEIKHHHHHHHH

SEQ ID NO: 1760 - protein, 276 aa, Artificial Sequence
  source: /note="Description of Artificial Sequence: Synthetic polypeptide"
MALPVTALLLPLALLLHAARPQVQLQESGPGLVKPSETLSLTCTVSGVSLPDYGVSWIRQPPGKGLEWIGVIWGSETTYYSSSLKSRVTISKDNSKNQVSLKLSSVTAADTAVYYCAKHYYYGGSYAMDYWGQGTLVTVSSGGGGSGGGGSGGGGSGGGGSEIVMTQSPATLSLSPGERATLSCRASQDISKYLNWYQQKPGQAPRLLIYHTSRLHSGIPARFSGSGSGTDYTLTISSLQPEDFAVYFCQQGNTLPYTFGQGTKLEIKHHHHHHHH

SEQ ID NO: 1761 - protein, 276 aa, Artificial Sequence
  source: /note="Description of Artificial Sequence: Synthetic polypeptide"
MALPVTALLLPLALLLHAARPQVQLQESGPGLVKPSETLSLTCTVSGVSLPDYGVSWIRQPPGKGLEWIGVIWGSETTYYQSSLKSRVTISKDNSKNQVSLKLSSVTAADTAVYYCAKHYYYGGSYAMDYWGQGTLVTVSSGGGGSGGGGSGGGGSGGGGSEIVMTQSPATLSLSPGERATLSCRASQDISKYLNWYQQKPGQAPRLLIYHTSRLHSGIPARFSGSGSGTDYTLTISSLQPEDFAVYFCQQGNTLPYTFGQGTKLEIKHHHHHHHH

SEQ ID NO: 1762 - protein, 271 aa, Artificial Sequence
  source: /note="Description of Artificial Sequence: Synthetic polypeptide"
MALPVTALLLPLALLLHAARPEIVMTQSPATLSLSPGERATLSCRASQDISKYLNWYQQKPGQAPRLLIYHTSRLHSGIPARFSGSGSGTDYTLTISSLQPEDFAVYFCQQGNTLPYTFGQGTKLEIKGGGGSGGGGSGGGGSQVQLQESGPGLVKPSETLSLTCTVSGVSLPDYGVSWIRQPPGKGLEWIGVIWGSETTYYNSSLKSRVTISKDNSKNQVSLKLSSVTAADTAVYYCAKHYYYGGSYAMDYWGQGTLVTVSSHHHHHHHH

SEQ ID NO: 1763 - protein, 271 aa, Artificial Sequence
  source: /note="Description of Artificial Sequence: Synthetic polypeptide"
MALPVTALLLPLALLLHAARPQVQLQESGPGLVKPSETLSLTCTVSGVSLPDYGVSWIRQPPGKGLEWIGVIWGSETTYYNSSLKSRVTISKDNSKNQVSLKLSSVTAADTAVYYCAKHYYYGGSYAMDYWGQGTLVTVSSGGGGSGGGGSGGGGSEIVMTQSPATLSLSPGERATLSCRASQDISKYLNWYQQKPGQAPRLLIYHTSRLHSGIPARFSGSGSGTDYTLTISSLQPEDFAVYFCQQGNTLPYTFGQGTKLEIKHHHHHHHH

SEQ ID NO: 1764 - protein, 276 aa, Artificial Sequence
  source: /note="Description of Artificial Sequence: Synthetic polypeptide"
MALPVTALLLPLALLLHAARPEIVMTQSPATLSLSPGERATLSCRASQDISKYLNWYQQKPGQAPRLLIYHTSRLHSGIPARFSGSGSGTDYTLTISSLQPEDFAVYFCQQGNTLPYTFGQGTKLEIKGGGGSGGGGSGGGGSGGGGSQVQLQESGPGLVKPSETLSLTCTVSGVSLPDYGVSWIRQPPGKGLEWIGVIWGSETTYYQSSLKSRVTISKDNSKNQVSLKLSSVTAADTAVYYCAKHYYYGGSYAMDYWGQGTLVTVSSHHHHHHHH

SEQ ID NO: 1765 - protein, 144 aa, Artificial Sequence
  source: /note="Description of Artificial Sequence: Synthetic Chimeric Antigen Receptor sequence"
MALPVTALLLPLALLLHAARPDIQMTQTTSSLSASLGDRVTISCRASQDISKYLNWYQQKPDGTVKLLIYHTSRLHSGVPSRFSGSGSGTDYSLTISNLEQEDIATYFCQQGNTLPYTFGGGTKLEITGGGGSGGGGSGGGGSE

SEQ ID NO: 1766 - protein, 246 aa, Artificial Sequence
  source: /note="Description of Artificial Sequence: Synthetic polypeptide"
DIQMTQTTSSLSASLGDRVTISCRASQDISKYLNWYQQKPDGTVKLLIYHTSRLHSGVPSRFSGSGSGTDYSLTISNLEQEDIATYFCQQGNTLPYTFGGGTKLEITGSTSGSGKPGSGEGSTKGEVKLQESGPGLVAPSQSLSVTCTVSGVSLPDYGVSWIRQPPRKGLEWLGVIWGSETTYYNSALKSRLTIIKDNSKSQVFLKMNSLQTDDTAIYYCAKHYYYGGSYAMDYWGQGTSVTVSSE

SEQ ID NO: 1767 - protein, 248 aa, Artificial Sequence
  source: /note="Description of Artificial Sequence: Synthetic Chimeric Antigen Receptor sequence"
DIQMTQTTSSLSASLGDRVTISCRASQDISKYLNWYQQKPDGTVKLLIYHTSRLHSGVPSRFSGSGSGTDYSLTISNLEQEDIATYFCQQGNTLPYTFGGGTKLEITKAGGGGSGGGGSGGGGSGGGGSEVKLQESGPGLVAPSQSLSVTCTVSGVSLPDYGVSWIRQPPRKGLEWLGVIWGSETTYYNSALKSRLTIIKDNSKSQVFLKMNSLQTDDTAIYYCAKHYYYGGSYAMDYWGQGTSVTVS

SEQ ID NO: 1768 - protein, 251 aa, Artificial Sequence; identical to SEQ ID NO: 219
  source: /note="Description of Artificial Sequence: Synthetic Chimeric Antigen Receptor sequence"

SEQ ID NO: 1769 - protein, 254 aa, Artificial Sequence
  source: /note="Description of Artificial Sequence: Synthetic Chimeric Antigen Receptor sequence"
RCDIQMTQSPSSLSASVGDRVTITCRASEDIYFNLVWYQQKPGKAPKLLIYDTNRLADGVPSRFSGSGSGTQYTLTISSLQPEDFATYYCQHYKNYPLTFGQGTKLEIKRSGGGGSGGGGSGGGGSGGGGSRSEVQLVESGGGLVQPGGSLRLSCAASGFTLSNYGMHWIRQAPGKGLEWVSSISLNGGSTYYRDSVKGRFTISRDNAKSTLYLQMNSLRAEDTAVYYCAAQDAYTGGYFDYWGQGTLVTVSSM

SEQ ID NO: 1770 - protein, 428 aa, Artificial Sequence
  source: /note="Description of Artificial Sequence: Synthetic Chimeric Antigen Receptor sequence"
MALPVTALLLPLALLLHAARPEIVLTQSPGTLSLSPGERATLSCRASQSVSSSYLAWYQQKPGQAPRLLIYGASSRATGIPDRFSGSGSGTDFTLTISRLEPEDFAVYYCQQYGSSRFTFGPGTKVDIKGSTSGSGKPGSGEGSTKGQVQLVQSGAEVKKPGSSVKVSCKDSGGTFSSYAISWVRQAPGQGLEWMGGIIPIFGTTNYAQQFQGRVTITADESTSTAYMELSSLRSEDTAVYYCAREAVAADWLDPWGQGTLVTVSSFVPVFLPAKPTTTPAPRPPTPAPTIASQPLSLRPEACRPAAGGAVHTRGLDFACDIYIWAPLAGTCGVLLLSLVITLYCNHRNRSKRSRLLHSDYMNMTPRRPGPTRKHYQPYAPPRDFAAYRSQVRKAAITSYEKSDGVYTGLSTRNQETYETLKHEKPPQ

SEQ ID NO: 1771 - protein, 432 aa, Artificial Sequence
  source: /note="Description of Artificial Sequence: Synthetic Chimeric Antigen Receptor sequence"
MLLLVTSLLLCELPHPAFLLIPDIQMTQTTSSLSASLGDRVTISCRASQDISKYLNWYQQKPDGTVKLLIYHTSRLHSGVPSRFSGSGSGTDYSLTISNLEQEDIATYFCQQGNTLPYTFGGGTKLEITGSTSGSGKPGSGEGSTKGEVKLQESGPGLVAPSQSLSVTCTVSGVSLPDYGVSWIRQPPRKGLEWLGVIWGSETTYYNSALKSRLTIIKDNSKSQVFLKMNSLQTDDTAIYYCAKHYYYGGSYAMDYWGQGTSVTVSSAAAFVPVFLPAKPTTTPAPRPPTPAPTIASQPLSLRPEACRPAAGGAVHTRGLDFACDIYIWAPLAGTCGVLLLSLVITLYCNHRNRSKRSRLLHSDYMNMTPRRPGPTRKHYQPYAPPRDFAAYRSQVRKAAITSYEKSDGVYTGLSTRNQETYETLKHEKPPQ

SEQ ID NO: 1772 - protein, 465 aa, Artificial Sequence
  source: /note="Description of Artificial Sequence: Synthetic polypeptide"
DIQMTQTTSSLSASLGDRVTISCRASQDISKYLNWYQQKPDGTVKLLIYHTSRLHSGVPSRFSGSGSGTDYSLTISNLEQEDIATYFCQQGNTLPYTFGGGTKLEITGGGGSGGGGSGGGGSEVKLQESGPGLVAPSQSLSVTCTVSGVSLPDYGVSWIRQPPRKGLEWLGVIWGSETTYYNSALKSRLTIIKDNSKSQVFLKMNSLQTDDTAIYYCAKHYYYGGSYAMDYWGQGTSVTVSSTTTPAPRPPTPAPTIASQPLSLRPEACRPAAGGAVHTRGLDFACDIYIWAPLAGTCGVLLLSLVITLYCKRGRKKLLYIFKQPFMRPVQTTQEEDGCSCRFPEEEEGGCELRVKFSRSADAPAYKQGQNQLYNELNLGRREEYDVLDKRRGRDPEMGGKPRRKNPQEGLYNELQKDKMAEAYSEIGMKGERRRGKGHDGLYQGLSTATKDTYDALHMQALPPR

SEQ ID NO: 1773 - protein, 465 aa, Artificial Sequence
  source: /note="Description of Artificial Sequence: Synthetic Chimeric Antigen Receptor sequence"
MGTSLLCWMALCLLGADHADAQVQLQQSGPELVKPGASVKISCKASGYAFSSSWMNWVKQRPGKGLEWIGRIYPGDEDTNYSGKFKDKATLTADKSSTTAYMQLSSLTSEDSAVYFCARSLLYGDYLDYWGQGTTLTVSSGGGGSGGGGSGGGGSQIVLTQSPAIMSASPGEKVTMTCSASSSVSYMHWYQQKSGTSPKRWIYDTSKLASGVPDRFSGSGSGTSYFLTINNMEAEDAATYYCQQWNINPLTFGAGTKLELKRSDPAEPKSPDKTHTCPPCPKDPKFWVLVVVGGVLACYSLLVTVAFIIFWVRSKRSRLLHSDYMNMTPRRPGPTRKHYQPYAPPRDFAAYRSRVKFSRSADAPAYQQGQNQLYNELNLGRREEYDVLDKRRGRDPEMGGKPRRKNPQEGLYNELQKDKMAEAYSEIGMKGERRRGKGHDGLYQGLSTATKDTYDALHMQALPPR

SEQ ID NO: 1774 - protein, 467 aa, Artificial Sequence
  source: /note="Description of Artificial Sequence: Synthetic polypeptide"
DIQMTQTTSSLSASLGDRVTISCRASQDISKYLNWYQQKPDGTVKLLIYHTSRLHSGVPSRFSGSGSGTDYSLTISNLEQEDIATYFCQQGNTLPYTFGGGTKLEITGSTSGSGKPGSGEGSTKGEVKLQESGPGLVAPSQSLSVTCTVSGVSLPDYGVSWIRQPPRKGLEWLGVIWGSETTYYNSALKSRLTIIKDNSKSQVFLKMNSLQTDDTAIYYCAKHYYYGGSYAMDYWGQGTSVTVSSAAAIEVMYPPPYLDNEKSNGTIIHVKGKHLCPSPLFPGPSKPFWVLVVVGGVLACYSLLVTVAFIIFWVRSKRSRLLHSDYMNMTPRRPGPTRKHYQPYAPPRDFAAYRSRVKFSRSADAPAYQQGQNQLYNELNLGRREEYDVLDKRRGRDPEMGGKPRRKNPQEGLYNELQKDKMAEAYSEIGMKGERRRGKGHDGLYQGLSTATKDTYDALHMQALPPR

SEQ ID NO: 1775 - protein, 476 aa, Artificial Sequence
  source: /note="Description of Artificial Sequence: Synthetic Chimeric Antigen Receptor sequence"
MALPVTALLLPLALLLHAARPEIVLTQSPGTLSLSPGERATLSCRASQSVSSSYLAWYQQKPGQAPRLLIYGASSRATGIPDRFSGSGSGTDFTLTISRLEPEDFAVYYCQQYGSSRFTFGPGTKVDIKGSTSGSGKPGSGEGSTKGQVQLVQSGAEVKKPGSSVKVSCKDSGGTFSSYAISWVRQAPGQGLEWMGGIIPIFGTTNYAQQFQGRVTITADESTSTAYMELSSLRSEDTAVYYCAREAVAADWLDPWGQGTLVTVSSFVPVFLPAKPTTTPAPRPPTPAPTIASQPLSLRPEACRPAAGGAVHTRGLDFACDIYIWAPLAGTCGVLLLSLVITLYCNHRNRSKRSRLLHSDYMNMTPRRPGPTRKHYQPYAPPRDFAAYRSQRRKYRSNKGESPVEPAEPCRYSCPREEEGSTIPIQEDYRKPEPACSPQVRKAAITSYEKSDGVYTGLSTRNQETYETLKHEKPPQ

SEQ ID NO: 1776 - protein, 476 aa, Artificial Sequence
  source: /note="Description of Artificial Sequence: Synthetic Chimeric Antigen Receptor sequence"
MLLLVTSLLLCELPHPAFLLIPDIQMTQTTSSLSASLGDRVTISCRASQDISKYLNWYQQKPDGTVKLLIYHTSRLHSGVPSRFSGSGSGTDYSLTISNLEQEDIATYFCQQGNTLPYTFGGGTKLEITGSTSGSGKPGSGEGSTKGEVKLQESGPGLVAPSQSLSVTCTVSGVSLPDYGVSWIRQPPRKGLEWLGVIWGSETTYYNSALKSRLTIIKDNSKSQVFLKMNSLQTDDTAIYYCAKHYYYGGSYAMDYWGQGTSVTVSSESKYGPPCPPCPMFWVLVVVGGVLACYSLLVTVAFIIFWVKRGRKKLLYIFKQPFMRPVQTTQEEDGCSCRFPEEEEGGCELRVKFSRSADAPAYQQGQNQLYNELNLGRREEYDVLDKRRGRDPEMGGKPRRKNPQEGLYNELQKDKMAEAYSEIGMKGERRRGKGHDGLYQGLSTATKDTYDALHMQALPPRLEGGGEGRGSLLTCG

SEQ ID NO: 1777 - protein, 480 aa, Artificial Sequence
  source: /note="Description of Artificial Sequence: Synthetic Chimeric Antigen Receptor sequence"
MLLLVTSLLLCELPHPAFLLIPDIQMTQTTSSLSASLGDRVTISCRASQDISKYLNWYQQKPDGTVKLLIYHTSRLHSGVPSRFSGSGSGTDYSLTISNLEQEDIATYFCQQGNTLPYTFGGGTKLEITGSTSGSGKPGSGEGSTKGEVKLQESGPGLVAPSQSLSVTCTVSGVSLPDYGVSWIRQPPRKGLEWLGVIWGSETTYYNSALKSRLTIIKDNSKSQVFLKMNSLQTDDTAIYYCAKHYYYGGSYAMDYWGQGTSVTVSSAAAFVPVFLPAKPTTTPAPRPPTPAPTIASQPLSLRPEACRPAAGGAVHTRGLDFACDIYIWAPLAGTCGVLLLSLVITLYCNHRNRSKRSRLLHSDYMNMTPRRPGPTRKHYQPYAPPRDFAAYRSQRRKYRSNKGESPVEPAEPCRYSCPREEEGSTIPIQEDYRKPEPACSPQVRKAAITSYEKSDGVYTGLSTRNQETYETLKHEKPPQ

SEQ ID NO: 1778 - protein, 484 aa, Artificial Sequence
  source: /note="Description of Artificial Sequence: Synthetic Chimeric Antigen Receptor sequence"
MALPVTALLLPLALLLHAARPDIQMTQTTSSLSASLGDRVTISCRASQDISKYLNWYQQKPDGTVKLLIYHTSRLHSGVPSRFSGSGSGTDYSLTISNLEQEDIATYFCQQGNTLPYTFGGGTKLEITGGGGSGGGGSGGGGSEVKLQESGPGLVAPSQSLSVTCTVSGVSLPDYGVSWIRQPPRKGLEWLGVIWGSETTYYNSALKSRLTIIKDNSKSQVFLKMNSLQTDDTAIYYCAKHYYYGGSYAMDYWGQGTSVTVSSTTTPAPRPPTPAPTIASQPLSLRPEACRPAAGGAVHTRGLDFACDMWAPLAGTCGVLLLSLVITLYCKRGRKKLLYIFKQPFMRPVQTTQEEDGCSCRFPEEEEGGCELRVKFSRSADAPAYKQGQNQLYNELNLGRREEYDVLDKRRGRDPEMGGKPRRKNPQEGLYNELQKDKMAEAYSEIGMKGERRRGKGHDGLYQGLSTATKDTYDALHMQALPPR

SEQ ID NO: 1779 - protein, 486 aa, Artificial Sequence
  source: /note="Description of Artificial Sequence: Synthetic Chimeric Antigen Receptor sequence"
MALPVTALLLPLALLLHAARPEIVMTQSPATLSLSPGERATLSCRASQDISKYLNWYQQKPGQAPRLLIYHTSRLHSGIPARFSGSGSGTDYTLTISSLQPEDFAVYFCQQGNTLPYTFGQGTKLEIKGGGGSGGGGSGGGGSQVQLQESGPGLVKPSETLSLTCTVSGVSLPDYGVSWIRQPPGKGLEWIGVIWGSETTYYQSSLKSRVTISKDNSKNQVSLKLSSVTAADTAVYYCAKHYYYGGSYAMDYWGQGTLVTVSSTTTPAPRPPTPAPTIASQPLSLRPEACRPAAGGAVHTRGLDFACDIYIWAPLAGTCGVLLLSLVITLYCKRGRKKLLYIFKQPFMRPVQTTQEEDGCSCRFPEEEEGGCELRVKFSRSADAPAYKQGQNQLYNELNLGRREEYDVLDKRRGRDPEMGGKPRRKNPQEGLYNELQKDKMAEAYSEIGMKGERRRGKGHDGLYQGLSTATKDTYDALHMQALPPR

SEQ ID NO: 1780 - protein, 486 aa, Artificial Sequence
  source: /note="Description of Artificial Sequence: Synthetic Chimeric Antigen Receptor sequence"
MALPVTALLLPLALLLHAARPQVQLQESGPGLVKPSETLSLTCTVSGVSLPDYGVSWIRQPPGKGLEWIGVIWGSETTYYQSSLKSRVTISKDNSKNQVSLKLSSVTAADTAVYYCAKHYYYGGSYAMDYWGQGTLVTVSSGGGGSGGGGSGGGGSEIVMTQSPATLSLSPGERATLSCRASQDISKYLNWYQQKPGQAPRLLIYHTSRLHSGIPARFSGSGSGTDYTLTISSLQPEDFAVYFCQQGNTLPYTFGQGTKLEIKTTTPAPRPPTPAPTIASQPLSLRPEACRPAAGGAVHTRGLDFACDIYIWAPLAGTCGVLLLSLVITLYCKRGRKKLLYIFKQPFMRPVQTTQEEDGCSCRFPEEEEGGCELRVKFSRSADAPAYKQGQNQLYNELNLGRREEYDVLDKRRGRDPEMGGKPRRKNPQEGLYNELQKDKMAEAYSEIGMKGERRRGKGHDGLYQGLSTATKDTYDALHMQALPPR

SEQ ID NO: 1781 - protein, 489 aa, Artificial Sequence
  source: /note="Description of Artificial Sequence: Synthetic Chimeric Antigen Receptor sequence"
MALPVTALLLPLALLLHAARPDIQMTQTTSSLSASLGDRVTISCRASQDISKYLNWYQQKPDGTVKLLIYHTSRLHSGVPSRFSGSGSGTDYSLTISNLEQEDIATYFCQQGNTLPYTFGGGTKLEITGGGGSGGGGSGGGGSEVKLQESGPGLVAPSQSLSVTCTVSGVSLPDYGVSWIRQPPRKGLEWLGVIWGSETTYYNSALKSRLTIIKDNSKSQVFLKMNSLQTDDTAIYYCAKHYYYGGSYAMDYWGQGTSVTVSSTRTTTPAPRPPTPAPTIASQPLSLRPEACRPAAGGAVHTRGLDFACDIYIWAPLAGTCGVLLLSLVITLYCAVSLSKMLKKRSPLTTGVYVKMPPTEPECEKQFQPYFIPINSARVKFSRSADAPAYKQGQNQLYNELNLGRREEYDVLDKRRGRDPEMGGKPRRKNPQEGLYNELQKDKMAEAYSEIGMKGERRRGKGHDGLYQGLSTATKDTYDALHMQALPPR

SEQ ID NO: 1782 - protein, 491 aa, Artificial Sequence
  source: /note="Description of Artificial Sequence: Synthetic Chimeric Antigen Receptor sequence"
MALPVTALLLPLALLLHAARPEIVMTQSPATLSLSPGERATLSCRASQDISKYLNWYQQKPGQAPRLLIYHTSRLHSGIPARFSGSGSGTDYTLTISSLQPEDFAVYFCQQGNTLPYTFGQGTKLEIKGGGGSGGGGSGGGGSGGGGSQVQLQESGPGLVKPSETLSLTCTVSGVSLPDYGVSWIRQPPGKGLEWIGVIWGSETTYYNSSLKSRVTISKDNSKNQVSLKLSSVTAADTAVYYCAKHYYYGGSYAMDYWGQGTLVTVSSTTTPAPRPPTPAPTIASQPLSLRPEACRPAAGGAVHTRGLDFACDIYIWAPLAGTCGVLLLSLVITLYCKRGRKKLLYIFKQPFMRPVQTTQEEDGCSCRFPEEEEGGCELRVKFSRSADAPAYKQGQNQLYNELNLGRREEYDVLDKRRGRDPEMGGKPRRKNPQEGLYNELQKDKMAEAYSEIGMKGERRRGKGHDGLYQGLSTATKDTYDALHMQALPPR

SEQ ID NO: 1783 - protein, 494 aa, Artificial Sequence
  source: /note="Description of Artificial Sequence: Synthetic Chimeric Antigen Receptor sequence"
METDTLLLWVLLLWVPGSTGDIQMTQTTSSLSASLGDRVTISCRASQDISKYLNWYQQKPDGTVKLLIYHTSRLHSGVPSRFSGSGSGTDYSLTISNLEQEDIATYFCQQGNTLPYTFGGGTKLEITKAGGGGSGGGGSGGGGSGGGGSEVKLQESGPGLVAPSQSLSVTCTVSGVSLPDYGVSWIRQPPRKGLEWLGVIWGSETTYYNSALKSRLTIIKDNSKSQVFLKMNSLQTDDTAIYYCAKHYYYGGSYAMDYWGQGTSVTVSSDPTTTPAPRPPTPAPTIASQPLSLRPEACRPAAGGAVHTRGLDFACDIYIWAPLAGTCGVLLLSLVITLYCKRGRKKLLYIFKQPFMRPVQTTQEEDGCSCRFPEEEEGGCELRVKFSRSADAPAYQQGQNQLYNELNLGRREEYDVLDKRRGRDPEMGGKPRRKNPQEGLYNELQKDKMAEAYSEIGMKGERRRGKGHDGLYQGLSTATKDTYDALHMQALPPR

SEQ ID NO: 1784 - protein, 495 aa, Artificial Sequence
  source: /note="Description of Artificial Sequence: Synthetic Chimeric Antigen Receptor sequence"
MALPVTALLLPLALLLHAARPEVQLQQSGPELIKPGASVKMSCKASGYTFTSYVMHWVKQKPGQGLEWIGYINPYNDGTKYNEKFKGKATLTSDKSSSTAYMELSSLTSEDSAVYYCARGTYYYGSRVFDYWGQGTTLTVSSGGGGSGGGGSGGGGSDIVMTQAAPSIPVTPGESVSISCRSSKSLLNSNGNTYLYWFLQRPGQSPQLLIYRMSNLASGVPDRFSGSGSGTAFTLRISRVEAEDVGVYYCMQHLEYPFTFGAGTKLELKRADTTTPAPRPPTPAPTIASQPLSLRPEACRPAAGGAVHTRGLDFACDIYIWAPLAGTCGVLLLSLVITLYCKRGRKKLLYIFKQPFMRPVQTTQEEDGCSCRFPEEEEGGCELRVKFSRSADAPAYQQGQNQLYNELNLGRREEYDVLDKRRGRDPEMGGKPRRKNPQEGLYNELQKDKMAEAYSEIGMKGERRRGKGHDGLYQGLSTATKDTYDALHMQALPPR

SEQ ID NO: 1785 - protein, 495 aa, Artificial Sequence; identical to SEQ ID NO: 244
  source: /note="Description of Artificial Sequence: Synthetic Chimeric Antigen Receptor sequence"

SEQ ID NO: 1786 - protein, 502 aa, Artificial Sequence
  source: /note="Description of Artificial Sequence: Synthetic Chimeric Antigen Receptor sequence"
MALPVTALLLPLALLLHAARPEIVLTQSPGTLSLSPGERATLSCRASQSVSSSYLAWYQQKPGQAPRLLIYGASSRATGIPDRFSGSGSGTDFTLTISRLEPEDFAVYYCQQYGSSRFTFGPGTKVDIKGSTSGSGKPGSGEGSTKGQVQLVQSGAEVKKPGSSVKVSCKDSGGTFSSYAISWVRQAPGQGLEWMGGIIPIFGTTNYAQQFQGRVTITADESTSTAYMELSSLRSEDTAVYYCAREAVAADWLDPWGQGTLVTVSSFVPVFLPAKPTTTPAPRPPTPAPTIASQPLSLRPEACRPAAGGAVHTRGLDFACDIYIWAPLAGTCGVLLLSLVITLYCNHRNRSKRSRLLHSDYMNMTPRRPGPTRKHYQPYAPPRDFAAYRSRVKFSRSADAPAYQQGQNQLYNELNLGRREEYDVLDKRRGRDPEMGGKPRRKNPQEGLYNELQKDKMAEAYSEIGMKGERRRGKGHDGLYQGLSTATKDTYDALHMQALPPR

SEQ ID NO: 1787 - protein, 506 aa, Artificial Sequence
  source: /note="Description of Artificial Sequence: Synthetic Chimeric Antigen Receptor sequence"
MLLLVTSLLLCELPHPAFLLIPDIQMTQTTSSLSASLGDRVTISCRASQDISKYLNWYQQKPDGTVKLLIYHTSRLHSGVPSRFSGSGSGTDYSLTISNLEQEDIATYFCQQGNTLPYTFGGGTKLEITGSTSGSGKPGSGEGSTKGEVKLQESGPGLVAPSQSLSVTCTVSGVSLPDYGVSWIRQPPRKGLEWLGVIWGSETTYYNSALKSRLTIIKDNSKSQVFLKMNSLQTDDTAIYYCAKHYYYGGSYAMDYWGQGTSVTVSSAAAFVPVFLPAKPTTTPAPRPPTPAPTIASQPLSLRPEACRPAAGGAVHTRGLDFACDIYIWAPLAGTCGVLLLSLVITLYCNHRNRSKRSRLLHSDYMNMTPRRPGPTRKHYQPYAPPRDFAAYRSRVKFSRSADAPAYQQGQNQLYNELNLGRREEYDVLDKRRGRDPEMGGKPRRKNPQEGLYNELQKDKMAEAYSEIGMKGERRRGKGHDGLYQGLSTATKDTYDALHMQALPPR

SEQ ID NO: 1788 - protein, 508 aa, Artificial Sequence
  source: /note="Description of Artificial Sequence: Synthetic Chimeric Antigen Receptor sequence"
MALPVTALLLPLALLLHAARPEIVLTQSPGTLSLSPGERATLSCRASQSVSSSYLAWYQQKPGQAPRLLIYGASSRATGIPDRFSGSGSGTDFTLTISRLEPEDFAVYYCQQYGSSRFTFGPGTKVDIKGSTSGSGKPGSGEGSTKGQVQLVQSGAEVKKPGSSVKVSCKDSGGTFSSYAISWVRQAPGQGLEWMGGIIPIFGTTNYAQQFQGRVTITADESTSTAYMELSSLRSEDTAVYYCAREAVAADWLDPWGQGTLVTVSSFVPVFLPAKPTTTPAPRPPTPAPTIASQPLSLRPEACRPAAGGAVHTRGLDFACDIYIWAPLAGTCGVLLLSLVITLYCNHRNRFSVVKRGRKKLLYIFKQPFMRPVQTTQEEDGCSCRFPEEEEGGCELRVKFSRSADAPAYQQGQNQLYNELNLGRREEYDVLDKRRGRDPEMGGKPRRKNPQEGLYNELQKDKMAEAYSEIGMKGERRRGKGHDGLYQGLSTATKDTYDALHMQALPPR

SEQ ID NO: 1789 - protein, 508 aa, Artificial Sequence
  source: /note="Description of Artificial Sequence: Synthetic Chimeric Antigen Receptor sequence"
MALPVTALLLPLALLLHAARPEIVMTQSPATLSLSPGERATLSCRASQDISKYLNWYQQKPGQAPRLLIYHTSRLHSGIPARFSGSGSGTDYTLTISSLQPEDFAVYFCQQGNTLPYTFGQGTKLEIKGGGGSGGGGSGGGGSQVQLQESGPGLVKPSETLSLTCTVSGVSLPDYGVSWIRQPPGKGLEWIGVIWGSETTYYSSSLKSRVTISKDNSKNQVSLKLSSVTAADTAVYYCAKHYYYGGSYAMDYWGQGTLVTVSSTTTPAPRPPTPAPTIASQPLSLRPEACRPAAGGAVHTRGLDFACDIYIWAPLAGTCGVLLLSLVITLYCALYLLRRDQRLPPDAHKPPGGGSFRTPIQEEQADAHSTLAKIRSKRSRLLHSDYMNMTPRRPGPTRKHYQPYAPPRDFAAYRSILWHEMWHEGLIEASRLYFGERNVKGMFEVLEPLHAMMERGPQTLKETSFNQAYGRDLMEAQEWCRKYMKSGNVKDLLQAWDLYYHVFRRISK

SEQ ID NO: 1790 - protein, 508 aa, Artificial Sequence
  source: /note="Description of Artificial Sequence: Synthetic Chimeric Antigen Receptor sequence"
MALPVTALLLPLALLLHAARPEIVMTQSPATLSLSPGERATLSCRASQDISKYLNWYQQKPGQAPRLLIYHTSRLHSGIPARFSGSGSGTDYTLTISSLQPEDFAVYFCQQGNTLPYTFGQGTKLEIKGGGGSGGGGSGGGGSQVQLQESGPGLVKPSETLSLTCTVSGVSLPDYGVSWIRQPPGKGLEWIGVIWGSETTYYSSSLKSRVTISKDNSKNQVSLKLSSVTAADTAVYYCAKHYYYGGSYAMDYWGQGTLVTVSSTTTPAPRPPTPAPTIASQPLSLRPEACRPAAGGAVHTRGLDFACDIYIWAPLAGTCGVLLLSLVITLYCKRGRKKLLYIFKQPFMRPVQTTQEEDGCSCRFPEEEEGGCELRSKRSRLLHSDYMNMTPRRPGPTRKHYQPYAPPRDFAAYRSILWHEMWHEGLIEASRLYFGERNVKGMFEVLEPLHAMMERGPQTLKETSFNQAYGRDLMEAQEWCRKYMKSGNVKDLLQAWDLYYHVFRRISK

SEQ ID NO: 1791 - protein, 509 aa, Artificial Sequence
  source: /note="Description of Artificial Sequence: Synthetic Chimeric Antigen Receptor sequence"
MALPVTALLLPLALLLHAARPEIVLTQSPGTLSLSPGERATLSCRASQSVSSSYLAWYQQKPGQAPRLLIYGASSRATGIPDRFSGSGSGTDFTLTISRLEPEDFAVYYCQQYGSSRFTFGPGTKVDIKGSTSGSGKPGSGEGSTKGQVQLVQSGAEVKKPGSSVKVSCKDSGGTFSSYAISWVRQAPGQGLEWMGGIIPIFGTTNYAQQFQGRVTITADESTSTAYMELSSLRSEDTAVYYCAREAVAADWLDPWGQGTLVTVSSFVPVFLPAKPTTTPAPRPPTPAPTIASQPLSLRPEACRPAAGGAVHTRGLDFACDIYIWAPLAGTCGVLLLSLVITLYCNHRNQRRKYRSNKGESPVEPAEPCRYSCPREEEGSTIPIQEDYRKPEPACSPRVKFSRSADAPAYQQGQNQLYNELNLGRREEYDVLDKRRGRDPEMGGKPRRKNPQEGLYNELQKDKMAEAYSEIGMKGERRRGKGHDGLYQGLSTATKDTYDALHMQALPPR

SEQ ID NO: 1792 - protein, 513 aa, Artificial Sequence
  source: /note="Description of Artificial Sequence: Synthetic Chimeric Antigen Receptor sequence"
MLLLVTSLLLCELPHPAFLLIPDIQMTQTTSSLSASLGDRVTISCRASQDISKYLNWYQQKPDGTVKLLIYHTSRLHSGVPSRFSGSGSGTDYSLTISNLEQEDIATYFCQQGNTLPYTFGGGTKLEITGSTSGSGKPGSGEGSTKGEVKLQESGPGLVAPSQSLSVTCTVSGVSLPDYGVSWIRQPPRKGLEWLGVIWGSETTYYNSALKSRLTIIKDNSKSQVFLKMNSLQTDDTAIYYCAKHYYYGGSYAMDYWGQGTSVTVSSAAAFVPVFLPAKPTTTPAPRPPTPAPTIASQPLSLRPEACRPAAGGAVHTRGLDFACDIYIWAPLAGTCGVLLLSLVITLYCNHRNQRRKYRSNKGESPVEPAEPCRYSCPREEEGSTIPIQEDYRKPEPACSPRVKFSRSADAPAYQQGQNQLYNELNLGRREEYDVLDKRRGRDPEMGGKPRRKNPQEGLYNELQKDKMAEAYSEIGMKGERRRGKGHDGLYQGLSTATKDTYDALHMQALPPR

SEQ ID NO: 1793 - protein, 514 aa, Artificial Sequence
  source: /note="Description of Artificial Sequence: Synthetic Chimeric Antigen Receptor sequence"
MALPVTALLLPLALLLHAARPEIVMTQSPATLSLSPGERATLSCRASQDISKYLNWYQQKPGQAPRLLIYHTSRLHSGIPARFSGSGSGTDYTLTISSLQPEDFAVYFCQQGNTLPYTFGQGTKLEIKGGGGSGGGGSGGGGSQVQLQESGPGLVKPSETLSLTCTVSGVSLPDYGVSWIRQPPGKGLEWIGVIWGSETTYYSSSLKSRVTISKDNSKNQVSLKLSSVTAADTAVYYCAKHYYYGGSYAMDYWGQGTLVTVSSTTTPAPRPPTPAPTIASQPLSLRPEACRPAAGGAVHTRGLDFACDIYIWAPLAGTCGVLLLSLVITLYCQRRKYRSNKGESPVEPAEPCHYSCPREEEGSTIPIQEDYRKPEPACSPRSKRSRLLHSDYMNMTPRRPGPTRKHYQPYAPPRDFAAYRSILWHEMWHEGLIEASRLYFGERNVKGMFEVLEPLHAMMERGPQTLKETSFNQAYGRDLMEAQEWCRKYMKSGNVKDLLQAWDLYYHVFRRISK

SEQ ID NO: 1794 - protein, 522 aa, Artificial Sequence
  source: /note="Description of Artificial Sequence: Synthetic Chimeric Antigen Receptor sequence"
MALPVTALLLPLALLLHAARPEIVMTQSPATLSLSPGERATLSCRASQDISKYLNWYQQKPGQAPRLLIYHTSRLHSGIPARFSGSGSGTDYTLTISSLQPEDFAVYFCQQGNTLPYTFGQGTKLEIKGGGGSGGGGSGGGGSQVQLQESGPGLVKPSETLSLTCTVSGVSLPDYGVSWIRQPPGKGLEWIGVIWGSETTYYSSSLKSRVTISKDNSKNQVSLKLSSVTAADTAVYYCAKHYYYGGSYAMDYWGQGTLVTVSSTTTPAPRPPTPAPTIASQPLSLRPEACRPAAGGAVHTRGLDFACDIYIWAPLAGTCGVLLLSLVITLYCALYLLRRDQRLPPDAHKPPGGGSFRTPIQEEQADAHSTLAKIRSKRSRLLHSDYMNMTPRRPGPTRKHYQPYAPPRDFAAYRSGVQVETISPGDGRTFPKRGQTCVVHYTGMLEDGKKFDSSRDRNKPFKFMLGKQEVIRGWEEGVAQMSVGQRAKLTISPDYAYGATGHPGIIPPHATLVFDVELLKLE

SEQ ID NO: 1795 - protein, 522 aa, Artificial Sequence
  source: /note="Description of Artificial Sequence: Synthetic Chimeric Antigen Receptor sequence"
MALPVTALLLPLALLLHAARPEIVMTQSPATLSLSPGERATLSCRASQDISKYLNWYQQKPGQAPRLLIYHTSRLHSGIPARFSGSGSGTDYTLTISSLQPEDFAVYFCQQGNTLPYTFGQGTKLEIKGGGGSGGGGSGGGGSQVQLQESGPGLVKPSETLSLTCTVSGVSLPDYGVSWIRQPPGKGLEWIGVIWGSETTYYSSSLKSRVTISKDNSKNQVSLKLSSVTAADTAVYYCAKHYYYGGSYAMDYWGQGTLVTVSSTTTPAPRPPTPAPTIASQPLSLRPEACRPAAGGAVHTRGLDFACDIYIWAPLAGTCGVLLLSLVITLYCKRGRKKLLYIFKQPFMRPVQTTQEEDGCSCRFPEEEEGGCELRSKRSRLLHSDYMNMTPRRPGPTRKHYQPYAPPRDFAAYRSGVQVETISPGDGRTFPKRGQTCVVHYTGMLEDGKKFDSSRDRNKPFKFMLGKQEVIRGWEEGVAQMSVGQRAKLTISPDYAYGATGHPGIIPPHATLVFDVELLKLE

SEQ ID NO: 1796 - protein, 527 aa, Artificial Sequence
  source: /note="Description of Artificial Sequence: Synthetic Chimeric Antigen Receptor sequence"
DIQMTQTTSSLSASLGDRVTISCRASQDISKYLNWYQQKPDGTVKLLIYHTSRLHSGVPSRFSGSGSGTDYSLTISNLEQEDIATYFCQQGNTLPYTFGGGTKLEITGSTSGSGKPGSGEGSTKGEVKLQESGPGLVAPSQSLSVTCTVSGVSLPDYGVSWIRQPPRKGLEWLGVRWGSETTYYNSALKSRLTIIKDNSKSQVFLKMNSLQTDDTAIYYCAKHYYYGGSYAMDYWGQGTSVTVSSAAIEVMYPPPYLDNEKSNGTIIHVKGKHLCPSPLFPGPSKPFWVLVVVGGVLACYSLLVTVAFIIFWVRSKRSRLLHSDYMNMTPRRPGPTRKHYQPYAPPRDFAAYRSASGGGGSGGGGSKSRQTPPLASVEMEAMEALPVTWGTSSRDEDLENCSHHLGGGGSGGGGSRVKFSRSADAPAYQQGQNQLYNELNLGRREEYDVLDKRRGRDPEMGGKPRRKNPQEGLYNELQKDKMAEAYSEIGMKGERRRGKGHDGLYQGLSTATKDTYDALHMQALPPR

SEQ ID NO: 1797 - protein, 528 aa, Artificial Sequence
  source: /note="Description of Artificial Sequence: Synthetic Chimeric Antigen Receptor sequence"
MALPVTALLLPLALLLHAARPEIVMTQSPATLSLSPGERATLSCRASQDISKYLNWYQQKPGQAPRLLIYHTSRLHSGIPARFSGSGSGTDYTLTISSLQPEDFAVYFCQQGNTLPYTFGQGTKLEIKGGGGSGGGGSGGGGSQVQLQESGPGLVKPSETLSLTCTVSGVSLPDYGVSWIRQPPGKGLEWIGVIWGSETTYYSSSLKSRVTISKDNSKNQVSLKLSSVTAADTAVYYCAKHYYYGGSYAMDYWGQGTLVTVSSTTTPAPRPPTPAPTIASQPLSLRPEACRPAAGGAVHTRGLDFACDIYIWAPLAGTCGVLLLSLVITLYCQRRKYRSNKGESPVEPAEPCHYSCPREEEGSTIPIQEDYRKPEPACSPRSKRSRLLHSDYMNMTPRRPGPTRKHYQPYAPPRDFAAYRSGVQVETISPGDGRTFPKRGQTCVVHYTGMLEDGKKFDSSRDRNKPFKFMLGKQEVIRGWEEGVAQMSVGQRAKLTISPDYAYGATGHPGIIPPHATLVFDVELLKLE

SEQ ID NO: 1798 - protein, 530 aa, Artificial Sequence
  source: /note="Description of Artificial Sequence: Synthetic Chimeric Antigen Receptor sequence"
MALPVTALLLPLALLLHAARPDIMMTQSPSSLAVSAGEKVTMTCKSSQSVLYSSNQKNYLAWYQQKPGQSPKLLIYWASTRESGVPDRFTGSGSGTDFTLTISSVQPEDLAVYYCHQYLSSHTFGGGTKLEIKRGGGGSGGGGSGGGGSQLQQPGAELVRPGSSVKLSCKASGYTFTRYWIHWVKQRPIQGLEWIGNIDPSDSETHYNQKFKDKATLTVDKSSGTAYMQLSSLTSEDSAVYYCATEDLYYAMEYWGQGTSVTVSSTTTPAPRPPTPAPTIASQPLSLRPEACRPAAGGAVHTRGLDFACDIYIWAPLAGTCGVLLLSLVITLYCRSKRSRLLHSDYMNMTPRRPGPTRKHYQPYAPPRDFAAYRSKRGRKKLLYIFKQPFMRPVQTTQEEDGCSCRFPEEEEGGCELRVKFSRSADAPAYQQGQNQLYNELNLGRREEYDVLDKRRGRDPEMGGKPQRRKNPQEGLYNELQKDKMAEAYSEIGMKGERRRGKGHDGLYQGLSTATKDTYDALHMQALPPR

SEQ ID NO: 1799 - protein, 550 aa, Artificial Sequence
  source: /note="Description of Artificial Sequence: Synthetic Chimeric Antigen Receptor sequence"
MALPVTALLLPLALLLHAARPEIVLTQSPGTLSLSPGERATLSCRASQSVSSSYLAWYQQKPGQAPRLLIYGASSRATGIPDRFSGSGSGTDFTLTISRLEPEDFAVYYCQQYGSSRFTFGPGTKVDIKGSTSGSGKPGSGEGSTKGQVQLVQSGAEVKKPGSSVKVSCKDSGGTFSSYAISWVRQAPGQGLEWMGGIIPIFGTTNYAQQFQGRVTITADESTSTAYMELSSLRSEDTAVYYCAREAVAADWLDPWGQGTLVTVSSFVPVFLPAKPTTTPAPRPPTPAPTIASQPLSLRPEACRPAAGGAVHTRGLDFACDIYIWAPLAGTCGVLLLSLVITLYCNHRNRSKRSRLLHSDYMNMTPRRPGPTRKHYQPYAPPRDFAAYRSQRRKYRSNKGESPVEPAEPCRYSCPREEEGSTIPIQEDYRKPEPACSPRVKFSRSADAPAYQQGQNQLYNELNLGRREEYDVLDKRRGRDPEMGGKPRRKNPQEGLYNELQKDKMAEAYSEIGMKGERRRGKGHDGLYQGLSTATKDTYDALHMQALPPR

SEQ ID NO: 1800 - protein, 554 aa, Artificial Sequence
  source: /note="Description of Artificial Sequence: Synthetic Chimeric Antigen Receptor sequence"
MLLLVTSLLLCELPHPAFLLIPDIQMTQTTSSLSASLGDRVTISCRASQDISKYLNWYQQKPDGTVKLLIYHTSRLHSGVPSRFSGSGSGTDYSLTISNLEQEDIATYFCQQGNTLPYTFGGGTKLEITGSTSGSGKPGSGEGSTKGEVKLQESGPGLVAPSQSLSVTCTVSGVSLPDYGVSWIRQPPRKGLEWLGVIWGSETTYYNSALKSRLTIIKDNSKSQVFLKMNSLQTDDTAIYYCAKHYYYGGSYAMDYWGQGTSVTVSSAAAFVPVFLPAKPTTTPAPRPPTPAPTIASQPLSLRPEACRPAAGGAVHTRGLDFACDIYIWAPLAGTCGVLLLSLVITLYCNHRNRSKRSRLLHSDYMNMTPRRPGPTRKHYQPYAPPRDFAAYRSQRRKYRSNKGESPVEPAEPCRYSCPREEEGSTIPIQEDYRKPEPACSPRVKFSRSADAPAYQQGQNQLYNELNLGRREEYDVLDKRRGRDPEMGGKPRRKNPQEGLYNELQKDKMAEAYSEIGMKGERRRGKGHDGLYQGLSTATKDTYDALHMQALPPR

SEQ ID NO: 1801 - protein, 556 aa, Artificial Sequence
  source: /note="Description of Artificial Sequence: Synthetic Chimeric Antigen Receptor sequence"
MALPVTALLLPLALLLHAARPEIVLTQSPGTLSLSPGERATLSCRASQSVSSSYLAWYQQKPGQAPRLLIYGASSRATGIPDRFSGSGSGTDFTLTISRLEPEDFAVYYCQQYGSSRFTFGPGTKVDIKGSTSGSGKPGSGEGSTKGQVQLVQSGAEVKKPGSSVKVSCKDSGGTFSSYAISWVRQAPGQGLEWMGGIIPIFGTTNYAQQFQGRVTITADESTSTAYMELSSLRSEDTAVYYCAREAVAADWLDPWGQGTLVTVSSFVPVFLPAKPTTTPAPRPPTPAPTIASQPLSLRPEACRPAAGGAVHTRGLDFACDIYIWAPLAGTCGVLLLSLVITLYCNHRNQRRKYRSNKGESPVEPAEPCRYSCPREEEGSTIPIQEDYRKPEPACSPRFSVVKRGRKKLLYIFKQPFMRPVQTTQEEDGCSCRFPEEEEGGCELRVKFSRSADAPAYQQGQNQLYNELNLGRREEYDVLDKRRGRDPEMGGKPRRKNPQEGLYNELQKDKMAEAYSEIGMKGERRRGKGHDGLYQGLSTATKDTYDALHMQALPPR

SEQ ID NO: 1802 - protein, 560 aa, Artificial Sequence
  source: /note="Description of Artificial Sequence: Synthetic Chimeric Antigen Receptor sequence"
MLLLVTSLLLCELPHPAFLLIPDIQMTQTTSSLSASLGDRVTISCRASQDISKYLNWYQQKPDGTVKLLIYHTSRLHSGVPSRFSGSGSGTDYSLTISNLEQEDIATYFCQQGNTLPYTFGGGTKLEITGSTSGSGKPGSGEGSTKGEVKLQESGPGLVAPSQSLSVTCTVSGVSLPDYGVSWIRQPPRKGLEWLGVIWGSETTYYNSALKSRLTIIKDNSKSQVFLKMNSLQTDDTAIYYCAKHYYYGGSYAMDYWGQGTSVTVSSAAAFVPVFLPAKPTTTPAPRPPTPAPTIASQPLSLRPEACRPAAGGAVHTRGLDFACDIYIWAPLAGTCGVLLLSLVITLYCNHRNQRRKYRSNKGESPVEPAEPCRYSCPREEEGSTIPIQEDYRKPEPACSPRFSVVKRGRKKLLYIFKQPFMRPVQTTQEEDGCSCRFPEEEEGGCELRVKFSRSADAPAYQQGQNQLYNELNLGRREEYDVLDKRRGRDPEMGGKPRRKNPQEGLYNELQKDKMAEAYSEIGMKGERRRGKGHDGLYQGLSTATKDTYDALHMQALPPR

SEQ ID NO: 1803 - protein, 580 aa, Artificial Sequence
  source: /note="Description of Artificial Sequence: Synthetic Chimeric Antigen Receptor sequence"
MLLLVTSLLLCELPHPAFLLIPDIQMTQTTSSLSASLGDRVTISCRASQDISKYLNWYQQKPDGTVKLLIYHTSRLHSGVPSRFSGSGSGTDYSLTISNLEQEDIATYFCQQGNTLPYTFGGGTKLEITGSTSGSGKPGSGEGSTKGEVKLQESGPGLVAPSQSLSVTCTVSGVSLPDYGVSWIRQPPRKGLEWLGVIWGSETTYYNSALKSRLTIIKDNSKSQVFLKMNSLQTDDTAIYYCAKHYYYGGSYAMDYWGQGTSVTVSSESKYGPPCPPCPGGGSSGGGSGGQPREPQVYTLPPSQEEMTKNQVSLTCLVKGFYPSDIAVEWESNGQPENNYKTTPPVLDSDGSFFLYSRLTVDKSRWQEGNVFSCSVMHEALHNHYTQKSLSLSLGKMFWVLVVVGGVLACYSLLVTVAFIIFWVRSKRSRGGHSDYMNMTPRRPGPTRKHYQPYAPPRDFAAYRSGGGRVKFSRSADAPAYQQGQNQLYNELNLGRREEYDVLDKRRGRDPEMGGKPRRKNPQEGLYNELQKDKMAEAYSEIGMKGERRRGKGHDGLYQGLSTATKDTYDALHMQALPPR

SEQ ID NO: 1804 - protein, 680 aa, Artificial Sequence
  source: /note="Description of Artificial Sequence: Synthetic Chimeric Antigen Receptor sequence"
MLLLVTSLLLCELPHPAFLLIPDIQMTQTTSSLSASLGDRVTISCRASQDISKYLNWYQQKPDGTVKLLIYHTSRLHSGVPSRFSGSGSGTDYSLTISNLEQEDIATYFCQQGNTLPYTFGGGTKLEITGSTSGSGKPGSGEGSTKGEVKLQESGPGLVAPSQSLSVTCTVSGVSLPDYGVSWIRQPPRKGLEWLGVIWGSETTYYNSALKSRLTIIKDNSKSQVFLKMNSLQTDDTAIYYCAKHYYYGGSYAMDYWGQGTSVTVSSESKYGPPCPPCPAPEFEGGPSVFLFPPKPKDTLMISRTPEVTCVVVDVSQEDPEVQFNWYVDGVEVHNAKTKPREEQFNSTYRVVSVLTVLHQDWLNGKEYKCKVSNKGLPSSIEKTISKAKGQPREPQVYTLPPSQEEMTKNQVSLTCLVKGFYPSDIAVEWESNGQPENNYKTTPPVLDSDGSFFLYSRLTVDKSRWQEGNVFSCSVMHEALHNHYTQKSLSLSLGKMFWVLVVVGGVLACYSLLVTVAFIIFWVRSKRSRGGHSDYMNMTPRRPGPTRKHYQPYAPPRDFAAYRSGGGRVKFSRSADAPAYQQGQNQLYNELNLGRREEYDVLDKRRGRDPEMGGKPRRKNPQEGLYNELQKDKMAEAYSEIGMKGERRRGKGHDGLYQGLSTATKDTYDALHMQALPPR

SEQ ID NO: 1805 - protein, 680 aa, Artificial Sequence
  source: /note="Description of Artificial Sequence: Synthetic Chimeric Antigen Receptor sequence"
MLLLVTSLLLCELPHPAFLLIPDIQMTQTTSSLSASLGDRVTISCRASQDISKYLNWYQQKPDGTVKLLIYHTSRLHSGVPSRFSGSGSGTDYSLTISNLEQEDIATYFCQQGNTLPYTFGGGTKLEITGSTSGSGKPGSGEGSTKGEVKLQESGPGLVAPSQSLSVTCTVSGVSLPDYGVSWIRQPPRKGLEWLGVIWGSETTYYNSALKSRLTIIKDNSKSQVFLKMNSLQTDDTAIYYCAKHYYYGGSYAMDYWGQGTSVTVSSESKYGPPCPPCPAPEFLGGPSVFLFPPKPKDTLMISRTPEVTCVVVDVSQEDPEVQFNWYVDGVEVHNAKTKPREEQFQSTYRVVSVLTVLHQDWLNGKEYKCKVSNKGLPSSIEKTISKAKGQPREPQVYTLPPSQEEMTKNQVSLTCLVKGFYPSDIAVEWESNGQPENNYKTTPPVLDSDGSFFLYSRLTVDKSRWQEGNVFSCSVMHEALHNHYTQKSLSLSLGKMFWVLVVVGGVLACYSLLVTVAFIIFWVRSKRSRGGHSDYMNMTPRRPGPTRKHYQPYAPPRDFAAYRSGGGRVKFSRSADAPAYQQGQNQLYNELNLGRREEYDVLDKRRGRDPEMGGKPRRKNPQEGLYNELQKDKMAEAYSEIGMKGERRRGKGHDGLYQGLSTATKDTYDALHMQALPPR

SEQ ID NO: 1806 - protein, 680 aa, Artificial Sequence
  source: /note="Description of Artificial Sequence: Synthetic Chimeric Antigen Receptor sequence"
MLLLVTSLLLCELPHPAFLLIPDIQMTQTTSSLSASLGDRVTISCRASQDISKYLNWYQQKPDGTVKLLIYHTSRLHSGVPSRFSGSGSGTDYSLTISNLEQEDIATYFCQQGNTLPYTFGGGTKLEITGSTSGSGKPGSGEGSTKGEVKLQESGPGLVAPSQSLSVTCTVSGVSLPDYGVSWIRQPPRKGLEWLGVIWGSETTYYNSALKSRLTIIKDNSKSQVFLKMNSLQTDDTAIYYCAKHYYYGGSYAMDYWGQGTSVTVSSESKYGPPCPPCPAPEFEGGPSVFLFPPKPKDTLMISRTPEVTCVVVDVSQEDPEVQFNWYVDGVEVHNAKTKPREEQFQSTYRVVSVLTVLHQDWLNGKEYKCKVSNKGLPSSIEKTISKAKGQPREPQVYTLPPSQEEMTKNQVSLTCLVKGFYPSDIAVEWESNGQPENNYKTTPPVLDSDGSFFLYSRLTVDKSRWQEGNVFSCSVMHEALHNHYTQKSLSLSLGKMFWVLVVVGGVLACYSLLVTVAFIIFWVRSKRSRGGHSDYMNMTPRRPGPTRKHYQPYAPPRDFAAYRSGGGRVKFSRSADAPAYQQGQNQLYNELNLGRREEYDVLDKRRGRDPEMGGKPRRKNPQEGLYNELQKDKMAEAYSEIGMKGERRRGKGHDGLYQGLSTATKDTYDALHMQALPPR

SEQ ID NO: 1807 - protein, 681 aa, Artificial Sequence
  source: /note="Description of Artificial Sequence: Synthetic Chimeric Antigen Receptor sequence"
MGTSLLCWMALCLLGADHADAQVQLQQSGPELVKPGASVKISCKASGYAFSSSWMNWVKQRPGKGLEWIGRIYPGDEDTNYSGKFKDKATLTADKSSTTAYMQLSSLTSEDSAVYFCARSLLYGDYLDYWGQGTTLTVSSGGGGSGGGGSGGGGSQIVLTQSPAIMSASPGEKVTMTCSASSSVSYMHWYQQKSGTSPKRWIYDTSKLASGVPDRFSGSGSGTSYFLTINNMEAEDAATYYCQQWNINPLTFGAGTKLELKRSDPAEPKSPDKTHTCPPCPAPPVAGPSVFLFPPKPKDTLMIARTPEVTCVVVDVSHEDPEVKFNWYVDGVEVHNAKTKPREEQYNSTYRVVSVLTVLHQDWLNGKEYKCKVSNKALPAPIEKTISKAKGQPREPQVYTLPPSRDELTKNQVSLTCLVKGFYPSDIAVEWESNGQPENNYKTTPPVLDSDGSFFLYSKLTVDKSRWQQGNVFSCSVMHEALHNHYTQKSLSLSPGKKDPKFWVLVVVGGVLACYSLLVTVAFIIFWVRSKRSRLLHSDYMNMTPRRPGPTRKHYQPYAPPRDFAAYRSRVKFSRSADAPAYQQGQNQLYNELNLGRREEYDVLDKRRGRDPEMGGKPRRKNPQEGLYNELQKDKMAEAYSEIGMKGERRRGKGHDGLYQGLSTATKDTYDALHMQALPPR

SEQ ID NO: 1808 - protein, 711 aa, Artificial Sequence
  source: /note="Description of Artificial Sequence: Synthetic Chimeric Antigen Receptor sequence"
MLLLVTSLLLLCELPHPAFLLIPDIQMTQQTTSSLSASLGDRVTISCRASSQDISKYLNWYQQKPDGTVKLLLIYHTSRLHSGVPSRFSGSGGSGTDYSLTISNLEQEDIATYYFCQQGNTLPYTFGGGTKLEIITGSTSGSGKPGSGEGSTKGEEVKLQESGPGLVAPSQSLSVTTCTVSGVSLPDYGVSWIRQPPPRKGLEWLGVIWGSETTYYNSSALKSRLTIIKDNSKSQVFLKKMNSLQTDDTAIYYCAKHYYYYGGSYAMDYWGQGTSVTVSSEESKYGPPCPPCPAPEFLGGPSSVFLFPPKPKDTLMISRTPEVVTCVVVDVSQEDPEVQFNWYVVDGVEVHNAKTKPREEQFNSTTYRVVSVLTVLHQDWLNGKEYYKCKVSNKGLPSSIEKTISKAAKGQPREPQVYTLPPSQEEMTTKNQVSLTCLVKGFYPSDIAVVEWESNGQPENNYKTTPPVLDDSDGSFFLYSRLTVDKSRWQEEGNVFSCSVMHEALHNHYTQKKSLSLSLGKMFWVLVVVGGVLLACYSLLVTVAFIIFWVRSKRRSRGGHSDYMNMTPRRPGPTRRKHYQPYAPPRDFAAYRSRVKKFSRSADAPAYQQGQNQLYNEELNLGRREEYDVLDKRRGRDPPEMGGKPRRKNPQEGLYNELQQKDKMAEAYSEIGMKGERRRGGKGHDGLYQGLSTATKDTYDAALHMQALPPR

SEQ ID NO: 1809 - protein, 737 aa, Artificial Sequence
  source: /note="Description of Artificial Sequence: Synthetic Chimeric Antigen Receptor sequence"
EIVMTQSPATLSLSPGERATLSCRASQDISKYLNWYQQKPGQAPRLLIYHTSRLHSGIPARFSGSGSGTDYTLTISSLQPEDFAVYFCQQGNTLPYTFGQGTKLEIKGGGGSGGGGSGGGGSQVQLQESGPGLVKPSETLSLTCTVSGVSLPDYGVSWIRQPPGKGLEWIGVIWGSETTYYQSSLKSRVTISKDNSKNQVSLKLSSVTAADTAVYYCAKHYYYGGSYAMDYWGQGTLVTVSSGGGGSGGGGSGGGGSGGGGSEVQLQQSGPGLVKPSQTLSLTCAISGDSVSSNSAAWNWIRQSPSRGLEWLGRTYYRSKWYNDYAVSVKSRITINPDTSKNQFSLQLNSVTPEDTAVYYCARDLGWIAVAGTFDYWGQGTLVTVSSGGGGSGGGGSGGGGSQSALTQPASVSGSPGQSITISCTGTSSDVGGYNYVSWYQQHPGKAPKLMIYDVSKRPSGVSNRFSGSKSGNTASLTISGLQAEDEADYYCSSYTSSSLNHVFGTGTKVTVLTTTTPAPRPPTPAPTIASQPLSLRPEACRPAAGGAVHTRGLDFACDIYIWAPLAGTCGVLLLSLVITLYCKRGRKKLLYIFKQPFMRPVQTTQEEDGCSCRFPEEEEGGCELRVKFSRSADAPAYKQGQNQLYNELNLGRREEYDVLDKRRGRDPEMGGKPRRKNPQEGLYNELQKDKMAEAYSEIGMKGERRRGKGHDGLYQGLSTATKDTYDALHMQALPPR

SEQ ID NO: 1810 - protein, 819 aa, Artificial Sequence
  source: /note="Description of Artificial Sequence: Synthetic polypeptide"
DIQMTQTTSSLSASLGDRVTISCRASQDISKYLNWYQQKPDGTVKLLIYHTSRLHSGVPSRFSGSGSGTDYSLTISNLEQEDIATYFCQQGNTLPYTFGGGTKLEITGSTSGSGKPGSGEGSTKGEVKLQESGPGLVAPSQSLSVTCTVSGVSLPDYGVSWIRQPPRKGLEWLGVIWGSETTYYNSALKSRLTIIKDNSKSQVFLKMNSLQTDDTAIYYCAKHYYYGGSYAMDYWGQGTSVTVSSESKYGPPCPPCPMFWVLVVVGGVLACYSLLVTVAFIIFWVKRGRKKLLYIFKQPFMRPVQTTQEEDGCSCRFEEEEGGCELRVKFSRSADAPAYQQGQNQLYNELNLGRREEYDVLDKRRGRDPEMGGKPRRKNPQEGLYNELQKDKMAEAYSEIGMKGERRRGKGHDGLYQGLSTATKDTYDALHMQALPPRLEGGGEGRGSLLTCGDVEENPGPRMLLLVTSLLLCELPHPAFLLIPRKVCNGIGIGEFKDSLSINATNIKHFKNCTSISGDLHILPVAFRGDSFTHTPPLDPQELDILKTVKEITGFLLIQAWPENRTDLHAFENLEIIRGRTKQHGQFSLAVVSLNITSLGLRSLKEISDGDVIISGNKNLCYANTINWKKLFGTSGQKTKIISNRGENSCKATGQVCHALCSPEGCWGPEPRDCVSCRNVSRGRECVDKCNLLEGEPREFVENSECIQCHPECLPQAMNITCTGRGPDNCIQCAHYIDGPHCVKTCPAGVMGENNTLVWKYADAGHVCHLCHPNCTYGCTGPGLEGCPTNGPKIPSIATGMVGALLLLLVVALGIGLFM

SEQ ID NO: 1811 - protein, 838 aa, Artificial Sequence
  source: /note="Description of Artificial Sequence: Synthetic Chimeric Antigen Receptor sequence"
MLLLVTSLLLCELPHPAFLLIPQSVKESEGDLVTPAGNLTLTCTASGSDINDYPISWVRQAPGKGLEWIGFINSGGSTWYASWVKGRFTISRTSTTVDLKMTSLTTDDTATYFCARGYSTYYGDFNIWGPGTLVTISSGGGGSGGGGSGGGGSELVMTQTPSSTSGAVGGTVTINCQASQSIDSNLAWFQQKPGQPPTLLIYRASNLASGVPSRFSGSRSGTEYTLTISGVQREDAATYYCLGGVGNVSYRTSFGGGTEVVVKESKYGPPCPPCPMFWVLVVVGGVLACYSLLVTVAFIIFWVKRGRKKLLYIFKQPFMRPVQTTQEEDGCSCRFPEEEEGGCELRVKFSRSADAPAYQQGQNQLYNELNLGRREEYDVLDKRRGRDPEMGGKPRRKNPQEGLYNELQKDKMAEAYSEIGMKGERRRGKGHDGLYQGLSTATKDTYDALHMQALPPRLEGGGEGRGSLLTCGDVEENPGPRMLLLVTSLLLCELPHPAFLLIPRKVCNGIGIGEFKDSLSINATNIKHFKNCTSISGDLHILPVAFRGDSFTHTPPLDPQELDILKTVKEITGFLLIQAWPENRTDLHAFENLEIIRGRTKQHGQFSLAVVSLNITSLGLRSLKEISDGDVIISGNKNLCYANTINWKKLFGTSGQKTKIISNRGENSCKATGQVCHALCSPEGCWGPEPRDCVSCRNVSRGRECVDKCNLLEGEPREFVENSECIQCHPECLPQAMNITCTGRGPDNCIQCAHYIDGPHCVKTCPAGVMGENNTLVWKYADAGHVCHLCHPNCTYGCTGPGLEGCPTNGPKIPSIATGMVGALLLLLVVALGIGLFM

SEQ ID NO: 1812 - protein, 845 aa, Artificial Sequence
  source: /note="Description of Artificial Sequence: Synthetic Chimeric Antigen Receptor sequence"
MLLLVTSLLLCELPHPAFLLIPQEQLVESGGRLVTPGGSLTLSCKASGFDFSAYYMSWVRQAPGKGLEWIATIYPSSGKTYYATWVNGRFTISSDNAQNTVDLQMNSLTAADRATYFCARDSYADDGALFNIWGPGTLVTISSGGGGSGGGGSGGGGSELVLTQSPSVSAALGSPAKITCTLSSAHKTDTIDWYQQLQGEAPRYLMQVQSDGSYTKRPGVPDRFSGSSSGADRYLIIPSVQADDEADYYCGADYIGGYVFGGGTQLTVTGESKYGPPCPPCPMFWVLVVVGGVLACYSLLVTVAFIIFWVKRGRKKLLYIFKQPFMRPVQTTQEEDGCSCRFPEEEEGGCELRVKFSRSADAPAYQQGQNQLYNELNLGRREEYDVLDKRRGRDPEMGGKPRRKNPQEGLYNELQKDKMAEAYSEIGMKGERRRGKGHDGLYQGLSTATKDTYDALHMQALPPRLEGGGEGRGSLLTCGDVEENPGPRMLLLVTSLLLCELPHPAFLLIPRKVCNGIGIGEFKDSLSINATNIKHFKNCTSISGDLHILPVAFRGDSFTHTPPLDPQELDILKTVKEITGFLLIQAWPENRTDLHAFENLEIIRGRTKQHGQFSLAVVSLNITSLGLRSLKEISDGDVIISGNKNLCYANTINWKKLFGTSGQKTKIISNRGENSCKATGQVCHALCSPEGCWGPEPRDCVSCRNVSRGRECVDKCNLLEGEPREFVENSECIQCHPECLPQAMNITCTGRGPDNCIQCAHYIDGPHCVKTCPAGVMGENNTLVWKYADAGHVCHLCHPNCTYGCTGPGLEGCPTNGPKIPSIATGMVGALLLLLVVALGIGLFM

SEQ ID NO: 1813 - protein, 945 aa, Artificial Sequence
  source: /note="Description of Artificial Sequence: Synthetic Chimeric Antigen Receptor sequence"
MLLLVTSLLLCELPHPAFLLIPQSVKESEGDLVTPAGNLTLTCTASGSDINDYPISWVRQAPGKGLEWIGFINSGGSTWYASWVKGRFTISRTSTTVDLKMTSLTTDDTATYFCARGYSTYYGDFNIWGPGTLVTISSGGGGSGGGGSGGGGSELVMTQTPSSTSGAVGGTVTINCQASQSIDSNLAWFQQKPGQPPTLLIYRASNLASGVPSRFSGSRSGTEYTLTISGVQREDAATYYCLGGVGNVSYRTSFGGGTEVVVKESKYGPPCPPCPGQPREPQVYTLPPSQEEMTKNQVSLTCLVKGFYPSDIAVEWESNGQPENNYKTTPPVLDSDGSFFLYSRLTVDKSRWQEGNVFSCSVMHEALHNHYTQKSLSLSLGKMFWVLVVVGGVLACYSLLVTVAFIIFWVKRGRKKLLYIFKQPFMRPVQTTQEEDGCSCRFPEEEEGGCELRVKFSRSADAPAYQQGQNQLYNELNLGRREEYDVLDKRRGRDPEMGGKPRRKNPQEGLYNELQKDKMAEAYSEIGMKGERRRGKGHDGLYQGLSTATKDTYDALHMQALPPRLEGGGEGRGSLLTCGDVEENPGPRMLLLVTSLLLCELPHPAFLLIPRKVCNGIGIGEFKDSLSINATNIKHFKNCTSISGDLHILPVAFRGDSFTHTPPLDPQELDILKTVKEITGFLLIQAWPENRTDLHAFENLEIIRGRTKQHGQFSLAVVSLNITSLGLRSLKEISDGDVIISGNKNLCYANTINWKKLFGTSGQKTKIISNRGENSCKATGQVCHALCSPEGCWGPEPRDCVSCRNVSRGRECVDKCNLLEGEPREFVENSECIQCHPECLPQAMNITCTGRGPDNCIQCAHYIDGPHCVKTCPAGVMGENNTLVWKYADAGHVCHLCHPNCTYGCTGPGLEGCPTNGPKIPSIATGMVGALLLLLVVALGIGLFM

SEQ ID NO: 1814 - protein, 952 aa, Artificial Sequence
  source: /note="Description of Artificial Sequence: Synthetic Chimeric Antigen Receptor sequence"
MLLLVTSLLLCELPHPAFLLIPQEQLVESGGRLVTPGGSLTLSCKASGFDFSAYYMSWVRQAPGKGLEWIATIYPSSGKTYYATWVNGRFTISSDNAQNTVDLQMNSLTAADRATYFCARDSYADDGALFNIWGPGTLVTISSGGGGSGGGGSGGGGSELVLTQSPSVSAALGSPAKITCTLSSAHKTDTIDWYQQLQGEAPRYLMQVQSDGSYTKRPGVPDRFSGSSSGADRYLIIPSVQADDEADYYCGADYIGGYVFGGGTQLTVTGESKYGPPCPPCPGQPREPQVYTLPPSQEEMTKNQVSLTCLVKGFYPSDIAVEWESNGQPENNYKTTPPVLDSDGSFFLYSRLTVDKSRWQEGNVFSCSVMHEALHNHYTQKSLSLSLGKMFWVLVVVGGVLACYSLLVTVAFIIFWVKRGRKKLLYIFKQPFMRPVQTTQEEDGCSCRFPEEEEGGCELRVKFSRSADAPAYQQGQNQLYNELNLGRREEYDVLDKRRGRDPEMGGKPRRKNPQEGLYNELQKDKMAEAYSEIGMKGERRRGKGHDGLYQGLSTATKDTYDALHMQALPPRLEGGGEGRGSLLTCGDVEENPGPRMLLLVTSLLLCELPHPAFLLIPRKVCNGIGIGEFKDSLSINATNIKHFKNCTSISGDLHILPVAFRGDSFTHTPPLDPQELDILKTVKEITGFLLIQAWPENRTDLHAFENLEIIRGRTKQHGQFSLAVVSLNITSLGLRSLKEISDGDVIISGNKNLCYANTINWKKLFGTSGQKTKIISNRGENSCKATGQVCHALCSPEGCWGPEPRDCVSCRNVSRGRECVDKCNLLEGEPREFVENSECIQCHPECLPQAMNITCTGRGPDNCIQCAHYIDGPHCVKTCPAGVMGENNTLVWKYADAGHVCHLCHPNCTYGCTGPGLEGCPTNGPKIPSIATGMVGALLLLLVVALGIGLFM

SEQ ID NO: 1815 - protein, 1055 aa, Artificial Sequence [sequence omitted]

SEQ ID NO: 1816 - protein, 1062 aa, Artificial Sequence
  source: /note="Description of Artificial Sequence: Synthetic Chimeric Antigen Receptor sequence"
MLLLVTSLLLCELPHPAFLLIPQEQLVESGGRLVTPGGSLTLSCKASGFDFSAYYMSWVRQAPGKGLEWIATIYPSSGKTYYATWVNGRFTISSDNAQNTVDLQMNSLTAADRATYFCARDSYADDGALFNIWGPGTLVTISSGGGGSGGGGSGGGGSELVLTQSPSVSAALGSPAKITCTLSSAHKTDTIDWYQQLQGEAPRYLMQVQSDGSYTKRPGVPDRFSGSSSGADRYLIIPSVQADDEADYYCGADYIGGYVFGGGTQLTVTGESKYGPPCPPCPAPEFLGGPSVFLFPPKPKDTLMISRTPEVTCVVVDVSQEDPEVQFNWYVDGVEVHNAKTKPREEQFNSTYRVVSVLTVLHQDWLNGKEYKCKVSNKGLPSSIEKTISKAKGQPREPQVYTLPPSQEEMTKNQVSLTCLVKGFYPSDIAVEWESNGQPENNYKTTPPVLDSDGSFFLYSRLTVDKSRWQEGNVFSCSVMHEALHNHYTQKSLSLSLGKMFWVLVVVGGVLACYSLLVTVAFIIFWVKRGRKKLLYIFKQPFMRPVQTTQEEDGCSCRFPEEEEGGCELRVKFSRSADAPAYQQGQNQLYNELNLGRREEYDVLDKRRGRDPEMGGKPRRKNPQEGLYNELQKDKMAEAYSEIGMKGERRRGKGHDGLYQGLSTATKDTYDALHMQALPPRLEGGGEGRGSLLTCGDVEENPGPRMLLLVTSLLLCELPHPAFLLIPRKVCNGIGIGEFKDSLSINATNIKHFKNCTSISGDLHILPVAFRGDSFTHTPPLDPQELDILKTVKEITGFLLIQAWPENRTDLHAFENLEIIRGRTKQHGQFSLAVVSLNITSLGLRSLKEISDGDVIISGNKNLCYANTINWKKLFGTSGQKTKIISNRGENSCKATGQVCHALCSPEGCWGPEPRDCVSCRNVSRGRECVDKCNLLEGEPREFVENSECIQCHPECLPQAMNITCTGRGPDNCIQCAHYIDGPHCVKTCPAGVMGENNTLVWKYADAGHVCHLCHPNCTYGCTGPGLEGCPTNGPKIPSIATGMVGALLLLLVVALGIGLFM

SEQ ID NO: 1817 - protein, 1124 aa, Artificial Sequence
  source: /note="Description of Artificial Sequence: Synthetic Chimeric Antigen Receptor sequence"
MSLPVTALLLPLALLLHAARPDIQMTQTTSSLSASLGDRVTISCRASQDISKYLNWYQQKPDGTVKLLIYHTSRLHSGVPSRFSGSGSGTDYSLTISNLEQEDIATYFCQQGNTLPYTFGGGTKLEITKAGGGGSGGGGSGGGGSGGGGSEVKLQESGPGLVAPSQSLSVTCTVSGVSLPDYGVSWIRQPPRKGLEWLGVIWGSETTYYNSALKSRLTIIKDNSKSQVFLKMNSLQTDDTAIYYCAKHYYYGGSYAMDYWGQGTSVTVSSDPTTTPAPRPPTPAPTIASQPLSLRPEACRPAAGGAVHTRGLDFACDIFVWLVWGGVLACYSLLVTVAFIIFWVRRVKFSRSADAPAYQQGQNQLYNELNLGRREEYDVLDKRRGRDPEMGGKPRRKNPQEGLYNELQKDKMAEAYSEIGMKGERRRGKGHDGLYQGLSTATKDTYDALHMQALPPRRAEGRGSLLTCGDVEENPGPMAVPTQVLGLLLLWLTDARCDIQMTQSPSSLSASVGDRVTITCRASEDIYFNLVWYQQKPGKAPKLLIYDTNRLADGVPSRFSGSGSGTQYTLTISSLQPEDFATYYCQHYKNYPLTFGQGTKLEIKRSGGGGSGGGGSGGGGSGGGGSRSEVQLVESGGGLVQPGGSLRLSCAASGFTLSNYGMHWIRQAPGKGLEWVSSISLNGGSTYYRDSVKGRFTISRDNAKSTLYLQMNSLRAEDTAVYYCAAQDAYTGGYFDYWGQGTLVTVSSMDPAEPKSPDKTHTCPPCPAPPVAGPSVFLFPPKPKDTLMIARTPEVTCVWDVSHEDPEVKFNWYVDGVEVHNAKTKPREEQYNSTYRWSVLTVLHQDWLNGKEYKCKVSNKALPAPIEKTISKAKGQPREPQVYTLPPSRDELTKNQVSLTCLVKGFYPSDIAVEWESNGQPENNYKTTPPVLDSDGSFFLYSKLTVDKSRWQQGNVFSCSVMHEALHNHYTQKSLSLSPGKKDPKFWVLVWGGVLACYSLLVTVAFIIFWVRSRVFSRSADAPAYQQGQNQLYNELNLGRREEYDVLDKRRGRDPEMGGKPRRKNPQEGLYNELQKDKMAEAYSEIGMKGERRRGKGHDGLYQGLSTATKDTYDALHMQALPPR

SEQ ID NO: 1818 - protein, 486 aa, Artificial Sequence
  source: /note="Description of Artificial Sequence: Synthetic Chimeric Antigen Receptor sequence"
MALPVTALLLPLALLLHAARPQVQLQESGPGLVKPSETLSLTCTVSGVSLPDYGVSWIRQPPGKGLEWIGVIWGSETTYYSSSLKSRVTISKDNSKNQVSLKLSSVTAADTAVYYCAKHYYYGGSYAMDYWGQGTLVTVSSGGGGSGGGGSGGGGSEIVMTQSPATLSLSPGERATLSCRASQDISKYLNWYQQKPGQAPRLLIYHTSRLHSGIPARFSGSGSGTDYTLTISSLQPEDFAVYFCQQGNTLPYTFGQGTKLEIKTTTPAPRPPTPAPTIASQPLSLRPEACRPAAGGAVHTRGLDFACDIYIWAPLAGTCGVLLLSLVITLYCKRGRKKLLYIFKQPFMRPVQTTQEEDGCSCRFPEEEEGGCELRVKFSRSADAPAYKQGQNQLYNELNLGRREEYDVLDKRRGRDPEMGGKPRRKNPQEGLYNELQKDKMAEAYSEIGMKGERRRGKGHDGLYQGLSTATKDTYDALHMQALPPR

SEQ ID NO: 1819 - protein, 491 aa, Artificial Sequence
  source: /note="Description of Artificial Sequence: Synthetic Chimeric Antigen Receptor sequence"
MALPVTALLLPLALLLHAARPEIVMTQSPATLSLSPGERATLSCRASQDISKYLNWYQQKPGQAPRLLIYHTSRLHSGIPARFSGSGSGTDYTLTISSLQPEDFAVYFCQQGNTLPYTFGQGTKLEIKGGGGSGGGGSGGGGSGGGGSQVQLQESGPGLVKPSETLSLTCTVSGVSLPDYGVSWIRQPPGKGLEWIGVIWGSETTYYSSSLKSRVTISKDNSKNQVSLKLSSVTAADTAVYYCAKHYYYGGSYAMDYWGQGTLVTVSSTTTPAPRPPTPAPTIASQPLSLRPEACRPAAGGAVHTRGLDFACDIYIWAPLAGTCGVLLLSLVITLYCKRGRKKLLYIFKQPFMRPVQTTQEEDGCSCRFPEEEEGGCELRVKFSRSADAPAYKQGQNQLYNELNLGRREEYDVLDKRRGRDPEMGGKPRRKNPQEGLYNELQKDKMAEAYSEIGMKGERRRGKGHDGLYQGLSTATKDTYDALHMQALPPR

SEQ ID NO: 1820 - protein, 491 aa, Artificial Sequence
  source: /note="Description of Artificial Sequence: Synthetic Chimeric Antigen Receptor sequence"
MALPVTALLLPLALLLHAARPEIVMTQSPATLSLSPGERATLSCRASQDISKYLNWYQQKPGQAPRLLIYHTSRLHSGIPARFSGSGSGTDYTLTISSLQPEDFAVYFCQQGNTLPYTFGQGTKLEIKGGGGSGGGGSGGGGSGGGGSQVQLQESGPGLVKPSETLSLTCTVSGVSLPDYGVSWIRQPPGKGLEWIGVIWGSETTYYQSSLKSRVTISKDNSKNQVSLKLSSVTAADTAVYYCAKHYYYGGSYAMDYWGQGTLVTVSSTTTPAPRPPTPAPTIASQPLSLRPEACRPAAGGAVHTRGLDFACDIYIWAPLAGTCGVLLLSLVITLYCKRGRKKLLYIFKQPFMRPVQTTQEEDGCSCRFPEEEEGGCELRVKFSRSADAPAYKQGQNQLYNELNLGRREEYDVLDKRRGRDPEMGGKPRRKNPQEGLYNELQKDKMAEAYSEIGMKGERRRGKGHDGLYQGLSTATKDTYDALHMQALPPR

SEQ ID NO: 1821 - protein, 491 aa, Artificial Sequence
  source: /note="Description of Artificial Sequence: Synthetic Chimeric Antigen Receptor sequence"
MALPVTALLLPLALLLHAARPQVQLQESGPGLVKPSETLSLTCTVSGVSLPDYGVSWIRQPPGKGLEWIGVIWGSETTYYSSSLKSRVTISKDNSKNQVSLKLSSVTAADTAVYYCAKHYYYGGSYAMDYWGQGTLVTVSSGGGGSGGGGSGGGGSGGGGSEIVMTQSPATLSLSPGERATLSCRASQDISKYLNWYQQKPGQAPRLLIYHTSRLHSGIPARFSGSGSGTDYTLTISSLQPEDFAVYFCQQGNTLPYTFGQGTKLEIKTTTPAPRPPTPAPTIASQPLSLRPEACRPAAGGAVHTRGLDFACDIYIWAPLAGTCGVLLLSLVITLYCKRGRKKLLYIFKQPFMRPVQTTQEEDGCSCRFPEEEEGGCELRVKFSRSADAPAYKQGQNQLYNELNLGRREEYDVLDKRRGRDPEMGGKPRRKNPQEGLYNELQKDKMAEAYSEIGMKGERRRGKGHDGLYQGLSTATKDTYDALHMQALPPR

SEQ ID NO: 1822 - protein, 491 aa, Artificial Sequence
  source: /note="Description of Artificial Sequence: Synthetic Chimeric Antigen Receptor sequence"
MALPVTALLLPLALLLHAARPQVQLQESGPGLVKPSETLSLTCTVSGVSLPDYGVSWIRQPPGKGLEWIGVIWGSETTYYQSSLKSRVTISKDNSKNQVSLKLSSVTAADTAVYYCAKHYYYGGSYAMDYWGQGTLVTVSSGGGGSGGGGSGGGGSGGGGSEIVMTQSPATLSLSPGERATLSCRASQDISKYLNWYQQKPGQAPRLLIYHTSRLHSGIPARFSGSGSGTDYTLTISSLQPEDFAVYFCQQGNTLPYTFGQGTKLEIKTTTPAPRPPTPAPTIASQPLSLRPEACRPAAGGAVHTRGLDFACDIYIWAPLAGTCGVLLLSLVITLYCKRGRKKLLYIFKQPFMRPVQTTQEEDGCSCRFPEEEEGGCELRVKFSRSADAPAYKQGQNQLYNELNLGRREEYDVLDKRRGRDPEMGGKPRRKNPQEGLYNELQKDKMAEAYSEIGMKGERRRGKGHDGLYQGLSTATKDTYDALHMQALPPR

SEQ ID NO: 1823 - protein, 491 aa, Artificial Sequence
  source: /note="Description of Artificial Sequence: Synthetic Chimeric Antigen Receptor sequence"
MALPVTALLLPLALLLHAARPQVQLQESGPGLVKPSETLSLTCTVSGVSLPDYGVSWIRQPPGKGLEWIGVIWGSETTYYNSSLKSRVTISKDNSKNQVSLKLSSVTAADTAVYYCAKHYYYGGSYAMDYWGQGTLVTVSSGGGGSGGGGSGGGGSGGGGSEIVMTQSPATLSLSPGERATLSCRASQDISKYLNWYQQKPGQAPRLLIYHTSRLHSGIPARFSGSGSGTDYTLTISSLQPEDFAVYFCQQGNTLPYTFGQGTKLEIKTTTPAPRPPTPAPTIASQPLSLRPEACRPAAGGAVHTRGLDFACDIYIWAPLAGTCGVLLLSLVITLYCKRGRKKLLYIFKQPFMRPVQTTQEEDGCSCRFPEEEEGGCELRVKFSRSADAPAYKQGQNQLYNELNLGRREEYDVLDKRRGRDPEMGGKPRRKNPQEGLYNELQKDKMAEAYSEIGMKGERRRGKGHDGLYQGLSTATKDTYDALHMQALPPR

SEQ ID NO: 1824 - protein, 486 aa, Artificial Sequence
  source: /note="Description of Artificial Sequence: Synthetic Chimeric Antigen Receptor sequence"
MALPVTALLLPLALLLHAARPEIVMTQSPATLSLSPGERATLSCRASQDISKYLNWYQQKPGQAPRLLIYHTSRLHSGIPARFSGSGSGTDYTLTISSLQPEDFAVYFCQQGNTLPYTFGQGTKLEIKGGGGSGGGGSGGGGSQVQLQESGPGLVKPSETLSLTCTVSGVSLPDYGVSWIRQPPGKGLEWIGVIWGSETTYYNSSLKSRVTISKDNSKNQVSLKLSSVTAADTAVYYCAKHYYYGGSYAMDYWGQGTLVTVSSTTTPAPRPPTPAPTIASQPLSLRPEACRPAAGGAVHTRGLDFACDIYIWAPLAGTCGVLLLSLVITLYCKRGRKKLLYIFKQPFMRPVQTTQEEDGCSCRFPEEEEGGCELRVKFSRSADAPAYKQGQNQLYNELNLGRREEYDVLDKRRGRDPEMGGKPRRKNPQEGLYNELQKDKMAEAYSEIGMKGERRRGKGHDGLYQGLSTATKDTYDALHMQALPPR

SEQ ID NO: 1825 - protein, 939 aa, Artificial Sequence
  source: /note="Description of Artificial Sequence: Synthetic polypeptide"
MALPVTALLLPLALLLHAARPGSRGVQVETISPGDGRTFPKRGQTCVVHYTGMLEDGKKMDSSRDRNKPFKFMLGKQEVIRGWEEGVAQMSVGQRAKLTISPDYAYGATGHPGIIPPHATLVFDVELLKLETRGVQVETISPGDGRTFPKRGQTCVVHYTGMLEDGKKMDSSRDRNKPFKFMLGKQEVIRGWEEGVAQMSVGQRAKLTISPDYAYGATGHPGIIPPHATLVFDVELLKLETRGVQVETISPGDGRTFPKRGQTCVVHYTGMLEDGKKMDSSRDRNKPFKFMLGKQEVIRGWEEGVAQMSVGQRAKLTISPDYAYGATGHPGIIPPHATLVFDVELLKLETRGVQVETISPGDGRTFPKRGQTCVVHYTGMLEDGKKMDSSRDRNKPFKFMLGKQEVIRGWEEGVAQMSVGQRAKLTISPDYAYGATGHPGIIPPHATLVFDVELLKLETSARNRRKRGSDIQMTQTTSSLSASLGDRVTISCRASQDISKYLNWYQQKPDGTVKLLIYHTSRLHSGVPSRFSGSGSGTDYSLTISNLEQEDIATYFCQQGNTLPYTFGGGTKLEITGGGGSGGGGSGGGGSEVKLQESGPGLVAPSQSLSVTCTVSGVSLPDYGVSWIRQPPRKGLEWLGVIWGSETTYYNSALKSRLTIIKDNSKSQVFLKMNSLQTDDTAIYYCAKHYYYGGSYAMDYWGQGTSVTVSSASTTTPAPRPPTPAPTIASQPLSLRPEACRPAAGGAVHTRGLDFACDSGIYIWAPLAGTCGVLLLSLVITLYCKRGRKKLLYIFKQPFMRPVQTTQEEDGCSCRFPEEEEGGCELRVKFSRSADAPAYQQGQNQLYNELNLGRREEYDVLDKRRGRDPEMGGKPRRKNPQEGLYNELQKDKMAEAYSEIGMKGERRRGKGHDGLYQGLSTATKDTYDALHMQALPPRZ

SEQ ID NO: 1826 - protein, 970 aa, Artificial Sequence
  source: /note="Description of Artificial Sequence: Synthetic Chimeric Antigen Receptor sequence"
MLLLVTSLLLCELPHPAFLLIPDIQMTQTTSSLSASLGDRVTISCRASQDISKYLNWYQQKPDGTVKLLIYHTSRLHSGVPSRFSGSGSGTDYSLTISNLEQEDIATYFCQQGNTLPYTFGGGTKLEITGSTSGSGKPGSGEGSTKGEVKLQESGPGLVAPSQSLSVTCTVSGVSLPDYGVSWIRQPPRKGLEWLGVIWGSETTYYNSALKSRLTIIKDNSKSQVFLKMNSLQTDDTAIYYCAKHYYYGGSYAMDYWGQGTSVTVSSGGGGSEVQLQQSGAELVKPGASVKMSCKASGYTFTSYNMHWVKQTPGQGLEWIGAIYPGNGDTSYNQKFKGKATLTADKSSSTAYMQLSSLTSEDSADYYCARSNYYGSSYWFFDVWGAGTTVTVSSGSTSGGGSGGGSGGGGSSDIVLTQSPAILSASPGEKVTMTCRASSSVNYMDWYQKKPGSSPKPWIYATSNLASGVPARFSGSGSGTSYSLTISRVEAEDAATYYCQQWSFNPPTFGGGTKLEIKESKYGPPCPPCPAPEFLGGPSVFLFPPKPKDTLMISRTPEVTCVVVDVSQEDPEVQFNWYVDGVEVHNAKTKPREEQFNSTYRVVSVLTVLHQDWLNGKEYKCKVSNKGLPSSIEKTISKAKGQPREPQVYTLPPSQEEMTKNQVSLTCLVKGFYPSDIAVEWESNGQPENNYKTTPPVLDSDGSFFLYSRLTVDKSRWQEGNVFSCSVMHEALHNHYTQKSLSLSLGKMFWVLVVVGGVLACYSLLVTVAFIIFWVRSKRSRGGHSDYMNMTPRRPGPTRKHYQPYAPPRDFAAYRSKRGRKKLLYIFKQPFMRPVQTTQEEDGCSCRFPEEEEGGCELRVKFSRSADAPAYQQGQNQLYNELNLGRREEYDVLDKRRGRDPEMGGKPRRKNPQEGLYNELQKDKMAEAYSEIGMKGERRRGKGHDGLYQGLSTATKDTYDALHMQALPPR

SEQ ID NO: 1827 - protein, 1090 aa, Artificial Sequence
  source: /note="Description of Artificial Sequence: Synthetic Chimeric Antigen Receptor sequence"
MLLLVTSLLLCELPHPAFLLIPMTQTTSSLSASLGDRVTISCRASQDISKYLNWYQQKPDGTVKLLIYHTSRLHSGVPSRFSGSGSGTDYSLTISNLEQEDIATYFCQQGNTLPYTFGGGTKLEITGSTSGSGKPGSGEGSTKGEVKLQESGPGLVAPSQSLSVTCTVSGVSLPDYGVSWIRQPPRKGLEWLGVIWGSETTYYNSALKSRLTIIKDNSKSQVFLKMNSLQTDDTAIYYCAKHYYYGGSYAMDYWGQGTSVTVSSGGGGSEVQLQQSGAELVKPGASVKMSCKASGYTFTSYNMHWVKQTPGQGLEWIGAIYPGNGDTSYNQKFKGKATLTADKSSSTAYMQLSSLTSEDSADYYCARSNYYGSSYWFFDVWGAGTTVTVSSGSTSGGGSGGGSGGGGSSDIVLTQSPAILSASPGEKVTMTCRASSSVNYMDWYQKKPGSSPKPWIYATSNLASGVPARFSGSGSGTSYSLTISRVEAEDAATYYCQQWSFNPPTFGGGTKLEIKESKYGPPCPPCPMFWVLVVVGGVLACYSLLVTVAFIIFWVKRGRKKLLYIFKQPFMRPVQTTQEEDGCSCRFPEEEEGGCELRVKFSRSADAPAYQQGQNQLYNELNLGRREEYDVLDKRRGRDPEMGGKPRRKNPQEGLYNELQKDKMAEAYSEIGMKGERRRGKGHDGLYQGLSTATKDTYDALHMQALPPRLEGGGEGRGSLLTCGDVEENPGPRMLLLVTSLLLCELPHPAFLLIPRKVCNGIGIGEFKDSLSINATNIKHFKNCTSISGDLHILPVAFRGDSFTHTPPLDPQELDILKTVKEITGFLLIQAWPENRTDLHAFENLEIIRGRTKQHGQFSLAVVSLNITSLGLRSLKEISDGDVIISGNKNLCYANTINWKKLFGTSGQKTKIISNRGENSCKATGQVCHALCSPEGCWGPEPRDCVSCRNVSRGRECVDKCNLLEGEPREFVENSECIQCHPECLPQAMNITCTGRGPDNCIQCAHYIDGPHCVKTCPAGVMGENNTLVWKYADAGHVCHLCHPNCTYGCTGPGLEGCPTNGPKIPSIATGMVGALLLLLVVALGIGLFM

SEQ ID NO: 1828 - protein, 1133 aa, Artificial Sequence
  source: /note="Description of Artificial Sequence: Synthetic Chimeric Antigen Receptor sequence"
MLLLVTSLLLCELPHPAFLLIPDIQMTQTTSSLSASLGDRVTISCRASQDISKYLNWYQQKPDGTVKLLIYHTSRLHSGVPSRFSGSGSGTDYSLTISNLEQEDIATYFCQQGNTLPYTFGGGTKLEITGSTSGSGKPGSGEGSTKGEVKLQESGPGLVAPSQSLSVTCTVSGVSLPDYGVSWIRQPPRKGLEWLGVIWGSETTYYNSALKSRLTIIKDNSKSQVFLKMNSLQTDDTAIYYCAKHYYYGGSYAMDYWGQGTSVTVSSGGGGSEVQLQQSGAELVKPGASVKMSCKASGYTFTSYNMHWVKQTPGQGLEWIGAIYPGNGDTSYNQKFKGKATLTADKSSSTAYMQLSSLTSEDSADYYCARSNYYGSSYWFFDVWGAGTTVTVSSGSTSGGGSGGGSGGGGSSDIVLTQSPAILSASPGEKVTMTCRASSSVNYMDWYQKKPGSSPKPWIYATSNLASGVPARFSGSGSGTSYSLTISRVEAEDAATYYCQQWSFNPPTFGGGTKLEIKESKYGPPCPPCPKPTTTPAPRPPTPAPTIASQPLSLRPEACRPAAGGAVHTRGLDFACDIYIWAPLAGTCGVLLLSLVITKRGRKKLLYIFKQPFMRPVQTTQEEDGCSCRFPEEEEGGCELRVKFSRSADAPAYQQGQNQLYNELNLGRREEYDVLDKRRGRDPEMGGKPRRKNPQEGLYNELQKDKMAEAYSEIGMKGERRRGKGHDGLYQGLSTATKDTYDALHMQALPPRLEGGGEGRGSLLTCGDVEENPGPRMLLLVTSLLLCELPHPAFLLIPRKVCNGIGIGEFKDSLSINATNIKHFKNCTSISGDLHILPVAFRGDSFTHTPPLDPQELDILKTVKEITGFLLIQAWPENRTDLHAFENLEIIRGRTKQHGQFSLAVVSLNITSLGLRSLKEISDGDVIISGNKNLCYANTINWKKLFGTSGQKTKIISNRGENSCKATGQVCHALCSPEGCWGPEPRDCVSCRNVSRGRECVDKCNLLEGEPREFVENSECIQCHPECLPQAMNITCTGRGPDNCIQCAHYIDGPHCVKTCPAGVMGENNTLVWKYADAGHVCHLCHPNCTYGCTGPGLEGCPTNGPKIPSIATGMVGALLLLLVVALGIGLFM

SEQ ID NO: 1829 - protein, 727 aa, Artificial Sequence
  source: /note="Description of Artificial Sequence: Synthetic Chimeric Antigen Receptor sequence"
MVLLVTSLLLCELPHPAFLLIPDTEVQLVESGGGLVKPGGSLKLSCAASGFAFSIYDMSWVRQTPEKRLEWVAYISSGGGTYYPDTVKGRFTISRDNAKNTLYLQMSSLKSEDTAMYYCARHSGYGTHWGVLFAYWGQGTLVTVSAGGGGSGGGGSGGGGSDIQMTQTTSSLSASLGDRVTISCRASQDISNYLNWYQQKPDGTVKLLIYYTSILHSGVPSRFSGSGSGTDYSLTISNLEQEDFATYFCQQGNTLPWTFGGGTKLEIKAEPKSCDKTHTCPPCPAPELLGGPSVFLFPPKPKDTLMISRTPEVTCVVVDVSHEDPEVKFNWYVDGVEVHNAKTKPREEQYNSTYRVVSVLTVLHQDWLNGKEYKCKVSNKALPAPIEKTISKAKGQPREPQVYTLPPSRDELTKNQVSLTCLVKGFYPSDIAVEWESNGQPENNYKTTPPVLDSDGSFFLYSKLTVDKSRWQQGNVFSCSVMHEALHNHYTQKSLSLSPGKKDPKAAAIEVMYPPPYLDNEKSNGTIIHVKGKHLCPSPLFPGPSKPFWVLVVVGGVLACYSLLVTVAFIIFWVRSKRSRLLHSDYMNMTPRRPGPTRKHYQPYAPPRDFAAYRSRVKFSRSADAPAYQQGQNQLYNELNLGRREEYDVLDKRRGRDPEMGGKPRRKNPQEGLYNELQKDKMAEAYSEIGMKGERRRGKGHDGLYQGLSTATKDTYDALHMQALPPR

SEQ ID NO: 1830 - protein, 266 aa, Artificial Sequence
  source: /note="Description of Artificial Sequence: Synthetic Chimeric Antigen Receptor sequence"
METDTLLLWVLLLWVPGSTGDIVLTQSPAILSASPGEKVTMTCRASSSVNYMDWYQKKPGSSPKPWIYATSNLASGVPARFSGSGSGTSYSLTISRVEAEDAATYYCQQWSFNPPTFGGGTKLEIKGSTSGGGSGGGSGGGGSSEVQLQQSGAELVKPGASVKMSCKASGYTFTSYNMHWVKQTPGQGLEWIGAIYPGNGDTSYNQKFKGKATLTADKSSSTAYMQLSSLTSEDSADYYCARSNYYGSSYWFFDVWGAGTTVTVSS

SEQ ID NO: 1831 - protein, 529 aa, Artificial Sequence
  source: /note="Description of Artificial Sequence: Synthetic Chimeric Antigen Receptor sequence"
MALPVTALLLPLALLLHAARPDIVMTQSPATLSVTPGDRVSLSCRASQSISDYLHWYQQKSHESPRLLIKYASQSISGIPSRFSGSGSGSDFTLSINSVEPEDVGVYYCQNGHSFPLTFGAGTKLELRRGGGGSGGGGSGGGGSQVQLQQPGTELVRPGSSVKLSCKASGYTFTSYWVNWVKQRPDQGLEWIGRIDPYDSETHYNQKFTDKAISTIDTSSNTAYMQLSTLTSDASAVYYCSRSPRDSSTNLADWGQGTLVTVSSTTTPAPRPPTPAPTIASQPLSLRPEACRPAAGGAVHTRGLDFACDIYIWAPLAGTCGVLLLSLVITLYCRSKRSRLLHSDYMNMTPRRPGPTRKHYQPYAPPRDFAAYRSKRGRKKLLYIFKQPFMRPVQTTQEEDGCSCRFPEEEEGGCELRVKFSRSADAPAYQQGQNQLYNELNLGRREEYDVLDKRRGRDPEMGGKPQRRKNPQEGLYNELQKDKMAEAYSEIGMKGERRRGKGHDGLYQGLSTATKDTYDALHMQALPPR

SEQ ID NO: 1832 - protein, 389 aa, Artificial Sequence
  source: /note="Description of Artificial Sequence: Synthetic Chimeric Antigen Receptor sequence"
MALPVTALLLPLALLLHAARPGSGSGAQAAEVQLVESGGGLVQPGRSLRLSCAASGFTFNDYAMHWVRQAPGKGLEWVSTISWNSGSIGYADSVKGRFTISRDNAKKSLYLQMNSLRAEDTALYYCAKDIQYGNYYYGMDVWGQGTTVTVSSGGGGSGGGGSGGGGSEIVLTQSPATLSLSPGERATLSCRASQSVSSYLAWYQQKPGQAPRLLIYDASNRATGIPARFSGSGSGTDFTLTISSLEPEDFAVYYCQQRSNWPITFGQGTRLEIKRSDPASGAGSGSGSAIELLPVPGAKKSAKLYIPYIILTIIILTIVGFIWLLKVNGCRKYKLNKTESTPVVEEDEMQPYASYTEKNNPLYDTTNKVKASEALQSEVDTDLHTLSHG

SEQ ID NO: 1833 - protein, 381 aa, Artificial Sequence
  source: /note="Description of Artificial Sequence: Synthetic Chimeric Antigen Receptor sequence"
MALPVTALLLPLALLLHAARPGSGSGAQAAEVQLVESGGGLVQPGRSLRLSCAASGFTFNDYAMHWVRQAPGKGLEWVSTISWNSGSIGYADSVKGRFTISRDNAKKSLYLQMNSLRAEDTALYYCAKDIQYGNYYYGMDVWGQGTTVTVSSGGGGSGGGGSGGGGSEIVLTQSPATLSLSPGERATLSCRASQSVSSYLAWYQQKPGQAPRLLIYDASNRATGIPARFSGSGSGTDFTLTISSLEPEDFAVYYCQQRSNWPITFGQGTRLEIKRSDPASGAGSGSGSAVKEGPPSEHSGISRNAIIFLVLGILVFLILLGIGIYFYWSKCSREVLWHCHLCPSSTEHASASANGHVSYSAVSRENSSSQDPQTEGTRSHG

SEQ ID NO: 1834 - protein, 389 aa, Artificial Sequence
  source: /note="Description of Artificial Sequence: Synthetic Chimeric Antigen Receptor sequence"
MALPVTALLLPLALLLHAARPGSGSGAQAAEVQLVESGGGLVQPGRSLRLSCAASGFTFNDYAMHWVRQAPGKGLEWVSTISWNSGSIGYADSVKGRFTISRDNAKKSLYLQMNSLRAEDTALYYCAKDIQYGNYYYGMDVWGQGTTVTVSSGGGGSGGGGSGGGGSEIVLTQSPATLSLSPGERATLSCRASQSVSSYLAWYQQKPGQAPRLLIYDASNRATGIPARFSGSGSGTDFTLTISSLEPEDFAVYYCQQRSNWPITFGQGTRLEIKRSDPASGAGSGSGSAVQAPSSSPMGIIVAVVTGIAVAAIVAAVVALIYCRKKRISALPGYPECREMGETLPEKPANPTNPDEADKVGAENTITYSLLMHPDALEEPDDQNRISHG

SEQ ID NO: 1835 - protein, 407 aa, Artificial Sequence
  source: /note="Description of Artificial Sequence: Synthetic Chimeric Antigen Receptor sequence"
MALPVTALLLPLALLLHAARPGSGSGAQAAEVQLVESGGGLVQPGRSLRLSCAASGFTFNDYAMHWVRQAPGKGLEWVSTISWNSGSIGYADSVKGRFTISRDNAKKSLYLQMNSLRAEDTALYYCAKDIQYGNYYYGMDVWGQGTTVTVSSGGGGSGGGGSGGGGSEIVLTQSPATLSLSPGERATLSCRASQSVSSYLAWYQQKPGQAPRLLIYDASNRATGIPARFSGSGSGTDFTLTISSLEPEDFAVYYCQQRSNWPITFGQGTRLEIKRSDPASGAGSGSGSASFRALPHAWSDPSDPLPVSVTGNSRYLHALIGTSVVIIPFAILLFFLLHRWCANKKNAVVMDQEPAGNRTVNREDSDEQDPQEVTYAQLNHCVFTQRKITRPSQRPKTPPTDTSVSHG

SEQ ID NO: 1836 - protein, 412 aa, Artificial Sequence
  source: /note="Description of Artificial Sequence: Synthetic Chimeric Antigen Receptor sequence"
MALPVTALLLPLALLLHAARPGSGSGAQAAEVQLVESGGGLVQPGRSLRLSCAASGFTFNDYAMHWVRQAPGKGLEWVSTISWNSGSIGYADSVKGRFTISRDNAKKSLYLQMNSLRAEDTALYYCAKDIQYGNYYYGMDVWGQGTTVTVSSGGGGSGGGGSGGGGSEIVLTQSPATLSLSPGERATLSCRASQSVSSYLAWYQQKPGQAPRLLIYDASNRATGIPARFSGSGSGTDFTLTISSLEPEDFAVYYCQQRSNWPITFGQGTRLEIKRSDPASGAGSGSGSALFVHWKPEGRAGGVLGAVWGASITTLVFLCVCFIFRVKTRRKKAAQPVQNTDDVNPVMVSGSRGHQHQFQTGIVSDHPAEAGPISEDEQELHYAVLHFHKVQPQEPKVTDTEYSEIKIHKSHG

SEQ ID NO: 1837 - protein, 413 aa, Artificial Sequence
  source: /note="Description of Artificial Sequence: Synthetic Chimeric Antigen Receptor sequence"
MALPVTALLLPLALLLHAARPGSGSGAQAAEVQLVESGGGLVQPGRSLRLSCAASGFTFNDYAMHWVRQAPGKGLEWVSTISWNSGSIGYADSVKGRFTISRDNAKKSLYLQMNSLRAEDTALYYCAKDIQYGNYYYGMDVWGQGTTVTVSSGGGGSGGGGSGGGGSEIVLTQSPATLSLSPGERATLSCRASQSVSSYLAWYQQKPGQAPRLLIYDASNRATGIPARFSGSGSGTDFTLTISSLEPEDFAVYYCQQRSNWPITFGQGTRLEIKRSDPASGAGSGSGSAGPDGYRRDLMTAGVLWGLFGVLGFTGVALLLYALFHKISGESSATNEPRGASRPNPQEFTYSSPTPDMEELQPVYVNVGSVDVDVVYSQVWSMQQPESSANIRTLLENKDSQVIYSSVKKSSHG

SEQ ID NO: 1838 - protein, 415 aa, Artificial Sequence
  source: /note="Description of Artificial Sequence: Synthetic Chimeric Antigen Receptor sequence"
MALPVTALLLPLALLLHAARPGSGSGAQAAEVQLVESGGGLVQPGRSLRLSCAASGFTFNDYAMHWVRQAPGKGLEWVSTISWNSGSIGYADSVKGRFTISRDNAKKSLYLQMNSLRAEDTALYYCAKDIQYGNYYYGMDVWGQGTTVTVSSGGGGSGGGGSGGGGSEIVLTQSPATLSLSPGERATLSCRASQSVSSYLAWYQQKPGQAPRLLIYDASNRATGIPARFSGSGSGTDFTLTISSLEPEDFAVYYCQQRSNWPITFGQGTRLEIKRSDPASGAGSGSGSAPGHIRLYVVEKENLPVFPVWVVVGIVTAVVLGLTLLISMILAVLYRRKNSKRDYTGCSTSESLSPVKQAPRKSPSDTEGLVKSLPSGSHQGPVIYAQLDHSGGHHSDKINKSESVVYADIRKNSHG

SEQ ID NO: 1839 - protein, 419 aa, Artificial Sequence
  source: /note="Description of Artificial Sequence: Synthetic Chimeric Antigen Receptor sequence"
MALPVTALLLPLALLLHAARPGSGSGAQAAEVQLVESGGGLVQPGRSLRLSCAASGFTFNDYAMHWVRQAPGKGLEWVSTISWNSGSIGYADSVKGRFTISRDNAKKSLYLQMNSLRAEDTALYYCAKDIQYGNYYYGMDVWGQGTTVTVSSGGGGSGGGGSGGGGSEIVLTQSPATLSLSPGERATLSCRASQSVSSYLAWYQQKPGQAPRLLIYDASNRATGIPARFSGSGSGTDFTLTISSLEPEDFAVYYCQQRSNWPITFGQGTRLEIKRSDPASGAGSGSGSALQSKATSGVTQGVVGGAGATALVFLSFCVIFVVVRSCRKKSARPAAGVGDTGIEDANAVRGSASQGPLTEPWAEDSPPDQPPPASARSSVGEGELQYASLSFQMVKPWDSRGQEATDTEYSEIKIHRSHG

SEQ ID NO: 1840 - protein, 422 aa, Artificial Sequence
  source: /note="Description of Artificial Sequence: Synthetic Chimeric Antigen Receptor sequence"
MALPVTALLLPLALLLHAARPGSGSGAQAAEVQLVESGGGLVQPGRSLRLSCAASGFTFNDYAMHWVRQAPGKGLEWVSTISWNSGSIGYADSVKGRFTISRDNAKKSLYLQMNSLRAEDTALYYCAKDIQYGNYYYGMDVWGQGTTVTVSSGGGGSGGGGSGGGGSEIVLTQSPATLSLSPGERATLSCRASQSVSSYLAWYQQKPGQAPRLLIYDASNRATGIPARFSGSGSGTDFTLTISSLEPEDFAVYYCQQRSNWPITFGQGTRLEIKRSDPASGAGSGSGSAMPSTGGDSCPFCLKLLLPGLLLLLVVIILILAFWVLPKYKTRKAMRNNVPRDRGDTAMEVGIYANILEKQAKEESVPEVGSRPCVSTAQDEAKHSQELQYATPVFQEVAPREQEACDSYKSGYVYSELNFSHG

SEQ ID NO: 1841 - protein, 423 aa, Artificial Sequence
  source: /note="Description of Artificial Sequence: Synthetic Chimeric Antigen Receptor sequence"
MALPVTALLLPLALLLHAARPGSGSGAQAAEVQLVESGGGLVQPGRSLRLSCAASGFTFNDYAMHWVRQAPGKGLEWVSTISWNSGSIGYADSVKGRFTISRDNAKKSLYLQMNSLRAEDTALYYCAKDIQYGNYYYGMDVWGQGTTVTVSSGGGGSGGGGSGGGGSEIVLTQSPATLSLSPGERATLSCRASQSVSSYLAWYQQKPGQAPRLLIYDASNRATGIPARFSGSGSGTDFTLTISSLEPEDFAVYYCQQRSNWPITFGQGTRLEIKRSDPASGAGSGSGSALQQEYTGKMRPVSGVLLGAVGGAGATALVFLSFCVIFIVVRSCRKKSARPAADVGDIGMKDANTIRGSASQGNLTESWADDNPRHHGLAAHSSGEEREIQYAPLSFHKGEPQDLSGQEATNNEYSEIKIPKSHG

SEQ ID NO: 1842 - protein, 425 aa, Artificial Sequence
  source: /note="Description of Artificial Sequence: Synthetic Chimeric Antigen Receptor sequence"
MALPVTALLLPLALLLHAARPGSGSGAQAAEVQLVESGGGLVQPGRSLRLSCAASGFTFNDYAMHWVRQAPGKGLEWVSTISWNSGSIGYADSVKGRFTISRDNAKKSLYLQMNSLRAEDTALYYCAKDIQYGNYYYGMDVWGQGTTVTVSSGGGGSGGGGSGGGGSEIVLTQSPATLSLSPGERATLSCRASQSVSSYLAWYQQKPGQAPRLLIYDASNRATGIPARFSGSGSGTDFTLTISSLEPEDFAVYYCQQRSNWPITFGQGTRLEIKRSDPASGAGSGSGSALQNEYTGKMRPISGVTLGAFGGAGATALVFLYFCIIFVVVRSCRKKSARPAVGVGDTGMEDANAVRGSASQGPLIESPADDSPPHHAPPALATPSPEEGEIQYASLSFHKARPQYPQEQEAIGYEYSEINIPKSHG

SEQ ID NO: 1843 - protein, 428 aa, Artificial Sequence
  source: /note="Description of Artificial Sequence: Synthetic Chimeric Antigen Receptor sequence"
MALPVTALLLPLALLLHAARPGSGSGAQAAEVQLVESGGGLVQPGRSLRLSCAASGFTFNDYAMHWVRQAPGKGLEWVSTISWNSGSIGYADSVKGRFTISRDNAKKSLYLQMNSLRAEDTALYYCAKDIQYGNYYYGMDVWGQGTTVTVSSGGGGSGGGGSGGGGSEIVLTQSPATLSLSPGERATLSCRASQSVSSYLAWYQQKPGQAPRLLIYDASNRATGIPARFSGSGSGTDFTLTISSLEPEDFAVYYCQQRSNWPITFGQGTRLEIKRSDPASGAGSGSGSALNVTYVPQNPTTGIFPGDGSGKQETRAGVVHGAIGGAGVTALLALCLCLIFFIVKTHRRKAARTAVGRNDTHPTTGSASPKHQKKSKLHGPTETSSCSGAAPTVEMDEELHYASLNFHGMNPSKDTSTEYSEVRTQSHG

SEQ ID NO: 1844 - protein, 428 aa, Artificial Sequence
  source: /note="Description of Artificial Sequence: Synthetic Chimeric Antigen Receptor sequence"
MALPVTALLLPLALLLHAARPGSGSGAQAAEVQLVESGGGLVQPGRSLRLSCAASGFTFNDYAMHWVRQAPGKGLEWVSTISWNSGSIGYADSVKGRFTISRDNAKKSLYLQMNSLRAEDTALYYCAKDIQYGNYYYGMDVWGQGTTVTVSSGGGGSGGGGSGGGGSEIVLTQSPATLSLSPGERATLSCRASQSVSSYLAWYQQKPGQAPRLLIYDASNRATGIPARFSGSGSGTDFTLTISSLEPEDFAVYYCQQRSNWPITFGQGTRLEIKRSDPASGAGSGSGSAPYEWSNSSDPLLVSVTGNPSNSWPSPTEPSSETGNPRHLHVLIGTSVVIILFILLLFFLLHRWCCNKKNAVVMDQEPAGNRTVNREDSDEQDPQEVTYAQLNHCVFTQRKITRPSQRPKTPPTDIIVYTELPNAEPSHG

SEQ ID NO: 1845 - protein, 430 aa, Artificial Sequence
  source: /note="Description of Artificial Sequence: Synthetic Chimeric Antigen Receptor sequence"
MALPVTALLLPLALLLHAARPGSGSGAQAAEVQLVESGGGLVQPGRSLRLSCAASGFTFNDYAMHWVRQAPGKGLEWVSTISWNSGSIGYADSVKGRFTISRDNAKKSLYLQMNSLRAEDTALYYCAKDIQYGNYYYGMDVWGQGTTVTVSSGGGGSGGGGSGGGGSEIVLTQSPATLSLSPGERATLSCRASQSVSSYLAWYQQKPGQAPRLLIYDASNRATGIPARFSGSGSGTDFTLTISSLEPEDFAVYYCQQRSNWPITFGQGTRLEIKRSDPASGAGSGSGSALNFTVPTGARSNHLTSGVIEGLLSTLGPATVALLFCYGLKRKIGRRSARDPLRSLPSPLPQEFTYLNSPTPGQLQPIYENVNVVSGDEVYSLAYYNQPEQESVAAETLGTHMEDKVSLDIYSRLRKANITDVDYEDAMSHG

SEQ ID NO: 1846 - protein, 433 aa, Artificial Sequence
  source: /note="Description of Artificial Sequence: Synthetic Chimeric Antigen Receptor sequence"
MALPVTALLLPLALLLHAARPGSGSGAQAAEVQLVESGGGLVQPGRSLRLSCAASGFTFNDYAMHWVRQAPGKGLEWVSTISWNSGSIGYADSVKGRFTISRDNAKKSLYLQMNSLRAEDTALYYCAKDIQYGNYYYGMDVWGQGTTVTVSSGGGGSGGGGSGGGGSEIVLTQSPATLSLSPGERATLSCRASQSVSSYLAWYQQKPGQAPRLLIYDASNRATGIPARFSGSGSGTDFTLTISSLEPEDFAVYYCQQRSNWPITFGQGTRLEIKRSDPASGAGSGSGSAVTVRETPGNRDGLVAAGATGGLLSALLLAVALLFHCWRRRKSGVGFLGDETRLPPAPGPGESSHSICPAQVELQSLYVDVHPKKGDLVYSEIQTTQLGEEEEANTSRTLLEDKDVSVVYSEVKTQHPDNSAGKISSKDEESSHG

SEQ ID NO: 1847 - protein, 434 aa, Artificial Sequence
  source: /note="Description of Artificial Sequence: Synthetic Chimeric Antigen Receptor sequence"
MALPVTALLLPLALLLHAARPGSGSGAQAAEVQLVESGGGLVQPGRSLRLSCAASGFTFNDYAMHWVRQAPGKGLEWVSTISWNSGSIGYADSVKGRFTISRDNAKKSLYLQMNSLRAEDTALYYCAKDIQYGNYYYGMDVWGQGTTVTVSSGGGGSGGGGSGGGGSEIVLTQSPATLSLSPGERATLSCRASQSVSSYLAWYQQKPGQAPRLLIYDASNRATGIPARFSGSGSGTDFTLTISSLEPEDFAVYYCQQRSNWPITFGQGTRLEIKRSDPASGAGSGSGSAERRAEVPTAHPSPSPRPAGQFQTLVVGVVGGLLGSLVLLVWVLAVICSRAARGTIGARRTGQPLKEDPSAVPVFSVDYGELDFQWREKTPEPPVPCVPEQTEYATIVFPSGMGTSSPARRGSADGPRSAQPLRPEDGHCSWPLSH

SEQ ID NO: 1848 - protein, 435 aa, Artificial Sequence
  source: /note="Description of Artificial Sequence: Synthetic Chimeric Antigen Receptor sequence"
MALPVTALLLPLALLLHAARPGSGSGAQAAEVQLVESGGGLVQPGRSLRLSCAASGFTFNDYAMHWVRQAPGKGLEWVSTISWNSGSIGYADSVKGRFTISRDNAKKSLYLQMNSLRAEDTALYYCAKDIQYGNYYYGMDVWGQGTTVTVSSGGGGSGGGGSGGGGSEIVLTQSPATLSLSPGERATLSCRASQSVSSYLAWYQQKPGQAPRLLIYDASNRATGIPARFSGSGSGTDFTLTISSLEPEDFAVYYCQQRSNWPITFGQGTRLEIKRSDPASGAGSGSGSALYITGLTANRSGPFATGVAGGLLSIAGLAAGALLLYCWLSRKAGRKPASDPARSPPDSDSQEPTYHNVPAWEELQPVYTNANPRGENVVYSEVRIIQEKKKHAVASDPRHLRNKGSPIIYSEVKVASTPVSGSLFLASSAPHRSHG

SEQ ID NO: 1849 - protein, 435 aa, Artificial Sequence
  source: /note="Description of Artificial Sequence: Synthetic Chimeric Antigen Receptor sequence"
MALPVTALLLPLALLLHAARPGSGSGAQAAEVQLVESGGGLVQPGRSLRLSCAASGFTFNDYAMHWVRQAPGKGLEWVSTISWNSGSIGYADSVKGRFTISRDNAKKSLYLQMNSLRAEDTALYYCAKDIQYGNYYYGMDVWGQGTTVTVSSGGGGSGGGGSGGGGSEIVLTQSPATLSLSPGERATLSCRASQSVSSYLAWYQQKPGQAPRLLIYDASNRATGIPARFSGSGSGTDFTLTISSLEPEDFAVYYCQQRSNWPITFGQGTRLEIKRSDPASGAGSGSGSAPYEWSNSSDPLLVSVIGNPSNSWPSPTEPSSKTGNPRHLHILIGTSVVIILFILLFFLLHRWCSNKKNAAVMDQESAGNRTANSEDSDEQDPQEVTYTQLNHCVFTQRKITRPSQRPKTPPTDIIVYAELPNAESRSKVVSCPSHG

SEQ ID NO: 1850 - protein, 436 aa, Artificial Sequence
  source: /note="Description of Artificial Sequence: Synthetic Chimeric Antigen Receptor sequence"
MALPVTALLLPLALLLHAARPGSGSGAQAAEVQLVESGGGLVQPGRSLRLSCAASGFTFNDYAMHWVRQAPGKGLEWVSTISWNSGSIGYADSVKGRFTISRDNAKKSLYLQMNSLRAEDTALYYCAKDIQYGNYYYGMDVWGQGTTVTVSSGGGGSGGGGSGGGGSEIVLTQSPATLSLSPGERATLSCRASQSVSSYLAWYQQKPGQAPRLLIYDASNRATGIPARFSGSGSGTDFTLTISSLEPEDFAVYYCQQRSNWPITFGQGTRLEIKRSDPASGAGSGSGSAPYEWSDPSDPLLVSVTGNPSSSWPSPTEPSSKSGNPRHLHILIGTSVVIILFILLLFFLLHLWCSNKKNAAVMDQEPAGNRTANSEDSDEQDPEEVTYAQLDHCVFTQRKITRPSQRPKTPPTDTILYTELPNAKPRSKVVSCPSHG

SEQ ID NO: 1851 - protein, 439 aa, Artificial Sequence
  source: /note="Description of Artificial Sequence: Synthetic Chimeric Antigen Receptor sequence"
MALPVTALLLPLALLLHAARPGSGSGAQAAEVQLVESGGGLVQPGRSLRLSCAASGFTFNDYAMHWVRQAPGKGLEWVSTISWNSGSIGYADSVKGRFTISRDNAKKSLYLQMNSLRAEDTALYYCAKDIQYGNYYYGMDVWGQGTTVTVSSGGGGSGGGGSGGGGSEIVLTQSPATLSLSPGERATLSCRASQSVSSYLAWYQQKPGQAPRLLIYDASNRATGIPARFSGSGSGTDFTLTISSLEPEDFAVYYCQQRSNWPITFGQGTRLEIKRSDPASGAGSGSGSAVRVILAPWKKGLIAVVIIGVIIALLIIAAKCYFLRKAKAKQMPVEMSRPAVPLLNSNNEKMSDPNMEANSHYGHNDDVGNHAMKPINDNKEPLNSDVQYTEVQVSSAESHKDLGKKDTETVYSEVRKAVPDAVESRYSRTEGSLDGTSHG

SEQ ID NO: 1852 - protein, 445 aa, Artificial Sequence
  source: /note="Description of Artificial Sequence: Synthetic Chimeric Antigen Receptor sequence"
MALPVTALLLPLALLLHAARPGSGSGAQAAEVQLVESGGGLVQPGRSLRLSCAASGFTFNDYAMHWVRQAPGKGLEWVSTISWNSGSIGYADSVKGRFTISRDNAKKSLYLQMNSLRAEDTALYYCAKDIQYGNYYYGMDVWGQGTTVTVSSGGGGSGGGGSGGGGSEIVLTQSPATLSLSPGERATLSCRASQSVSSYLAWYQQKPGQAPRLLIYDASNRATGIPARFSGSGSGTDFTLTISSLEPEDFAVYYCQQRSNWPITFGQGTRLEIKRSDPASGAGSGSGSAQAVTTTTQRPSSMTTTWRLSSTTTTTGLRVTQGKRRSDSWHISLETAVGVAVAVTVLGIMILGLICLLRWRRRKGQQRTKATTPAREPFQNTEEPYENIRNEGQNTDPKLNPKDDGIVYASLALSSSTSPKAPPSHRPLKSPQNETLYSVLKASHG

SEQ ID NO: 1853 - protein, 447 aa, Artificial Sequence
  source: /note="Description of Artificial Sequence: Synthetic Chimeric Antigen Receptor sequence"
MALPVTALLLPLALLLHAARPGSGSGAQAAEVQLVESGGGLVQPGRSLRLSCAASGFTFNDYAMHWVRQAPGKGLEWVSTISWNSGSIGYADSVKGRFTISRDNAKKSLYLQMNSLRAEDTALYYCAKDIQYGNYYYGMDVWGQGTTVTVSSGGGGSGGGGSGGGGSEIVLTQSPATLSLSPGERATLSCRASQSVSSYLAWYQQKPGQAPRLLIYDASNRATGIPARFSGSGSGTDFTLTISSLEPEDFAVYYCQQRSNWPITFGQGTRLEIKRSDPASGAGSGSGSAPCVWSNSSDPLLVSVTGNPSSSWPSPTEPSSKSGICRHLHVLIGTSVVIFLFILLLFFLLYRWCSNKKNAAVMDQEPAGDRTVNRQDSDEQDPQEVTYAQLDHCVFIQRKISRPSQRPKTPLTDTSVYTELPNAEPRSKVVSCPRAPQSGLEGVFSHG

SEQ ID NO: 1854 - protein, 447 aa, Artificial Sequence
  source: /note="Description of Artificial Sequence: Synthetic Chimeric Antigen Receptor sequence"
MALPVTALLLPLALLLHAARPGSGSGAQAAEVQLVESGGGLVQPGRSLRLSCAASGFTFNDYAMHWVRQAPGKGLEWVSTISWNSGSIGYADSVKGRFTISRDNAKKSLYLQMNSLRAEDTALYYCAKDIQYGNYYYGMDVWGQGTTVTVSSGGGGSGGGGSGGGGSEIVLTQSPATLSLSPGERATLSCRASQSVSSYLAWYQQKPGQAPRLLIYDASNRATGIPARFSGSGSGTDFTLTISSLEPEDFAVYYCQQRSNWPITFGQGTRLEIKRSDPASGAGSGSGSALQNEGTGTSRPVSQVTLAAVGGAGATALAFLSFCIIFIIVRSCRKKSARPAAGVGDTGMEDAKAIRGSASQGPLTESWKDGNPLKKPPPAVAPSSGEEGELHYATLSFHKVKPQDPQGQEATDSEYSEIKIHKRETAETQACLRNHNPSSKEVRGSHG

SEQ ID NO: 1855 - protein, 463 aa, Artificial Sequence
  source: /note="Description of Artificial Sequence: Synthetic Chimeric Antigen Receptor sequence"
MALPVTALLLPLALLLHAARPGSGSGAQAAEVQLVESGGGLVQPGRSLRLSCAASGFTFNDYAMHWVRQAPGKGLEWVSTISWNSGSIGYADSVKGRFTISRDNAKKSLYLQMNSLRAEDTALYYCAKDIQYGNYYYGMDVWGQGTTVTVSSGGGGSGGGGSGGGGSEIVLTQSPATLSLSPGERATLSCRASQSVSSYLAWYQQKPGQAPRLLIYDASNRATGIPARFSGSGSGTDFTLTISSLEPEDFAVYYCQQRSNWPITFGQGTRLEIKRSDPASGAGSGSGSAGTSRNRTGLTAAGITGLVLSILVLAAAAALLHYARARRKPGGLSATGTSSHSPSECQEPSSSRPSRIDPQEPTHSKPLAPMELEPMYSNANPGDSNPIYSQIWSIQHTKENSANCPMMHQEHEELTVLYSELKKTHPDDSAGEASSRGRAHEEDDEENYENVPRVLLASDHSHG

SEQ ID NO: 1856 - protein, 464 aa, Artificial Sequence
  source: /note="Description of Artificial Sequence: Synthetic Chimeric Antigen Receptor sequence"
MALPVTALLLPLALLLHAARPGSGSGAQAAEVQLVESGGGLVQPGRSLRLSCAASGFTFNDYAMHWVRQAPGKGLEWVSTISWNSGSIGYADSVKGRFTISRDNAKKSLYLQMNSLRAEDTALYYCAKDIQYGNYYYGMDVWGQGTTVTVSSGGGGSGGGGSGGGGSEIVLTQSPATLSLSPGERATLSCRASQSVSSYLAWYQQKPGQAPRLLIYDASNRATGIPARFSGSGSGTDFTLTISSLEPEDFAVYYCQQRSNWPITFGQGTRLEIKRSDPASGAGSGSGSAGPSGDPSLSPTGSTPTPGPEDQPLTPTGLDPQSGLGRHLGVVTGVSVAFVLLLFLLLFLLLRHRHQSKHRTSAHFYRPAGAAGPEPKDQGLQKRASPVADIQEEILNAAVKDTQPKDGVEMDARAAASEAPQDVTYAQLHSLTLRREATEPPPSQEREPPAEPSIYAPLAIHSHG

SEQ ID NO: 1857 - protein, 467 aa, Artificial Sequence
  source: /note="Description of Artificial Sequence: Synthetic Chimeric Antigen Receptor sequence"
MALPVTALLLPLALLLHAARPGSGSGAQAAEVQLVESGGGLVQPGRSLRLSCAASGFTFNDYAMHWVRQAPGKGLEWVSTISWNSGSIGYADSVKGRFTISRDNAKKSLYLQMNSLRAEDTALYYCAKDIQYGNYYYGMDVWGQGTTVTVSSGGGGSGGGGSGGGGSEIVLTQSPATLSLSPGERATLSCRASQSVSSYLAWYQQKPGQAPRLLIYDASNRATGIPARFSGSGSGTDFTLTISSLEPEDFAVYYCQQRSNWPITFGQGTRLEIKRSDPASGAGSGSGSAPYEWSDASDPLPVSVTGNPSSSWPSPTEPSFKTGIARHLHAVIRYSVAIILFTILPFFLLHRWCSKKKDAAVMNQEPAGHRTVNREDSDEQDPQEVTYAQLDHCIFTQRKITGPSQRSKRPSTDTSVCIELPNAEPRALSPAHEHHSQALMGSSRETTALSQTQLASSHVPAAGISHG

SEQ ID NO: 1858 - protein, 467 aa, Artificial Sequence
  source: /note="Description of Artificial Sequence: Synthetic Chimeric Antigen Receptor sequence"
MALPVTALLLPLALLLHAARPGSGSGAQAAEVQLVESGGGLVQPGRSLRLSCAASGFTFNDYAMHWVRQAPGKGLEWVSTISWNSGSIGYADSVKGRFTISRDNAKKSLYLQMNSLRAEDTALYYCAKDIQYGNYYYGMDVWGQGTTVTVSSGGGGSGGGGSGGGGSEIVLTQSPATLSLSPGERATLSCRASQSVSSYLAWYQQKPGQAPRLLIYDASNRATGIPARFSGSGSGTDFTLTISSLEPEDFAVYYCQQRSNWPITFGQGTRLEIKRSDPASGAGSGSGSAPYEWSDPSDPLLVSVTGNSSSSSSSPTEPSSKTGIRRHLHILIGTSVAIILFIILFFFLLHCCCSNKKNAAVMDQEPAGDRTVNREDSDDQDPQEVTYAQLDHCVFTQTKITSPSQRPKTPPTDTTMYMELPNAKPRSLSPAHKHHSQALRGSSRETTALSQNRVASSHVPAAGISHG

SEQ ID NO: 1859 - protein, 471 aa, Artificial Sequence
  source: /note="Description of Artificial Sequence: Synthetic Chimeric Antigen Receptor sequence"
MALPVTALLLPLALLLHAARPGSGSGAQAAEVQLVESGGGLVQPGRSLRLSCAASGFTFNDYAMHWVRQAPGKGLEWVSTISWNSGSIGYADSVKGRFTISRDNAKKSLYLQMNSLRAEDTALYYCAKDIQYGNYYYGMDVWGQGTTVTVSSGGGGSGGGGSGGGGSEIVLTQSPATLSLSPGERATLSCRASQSVSSYLAWYQQKPGQAPRLLIYDASNRATGIPARFSGSGSGTDFTLTISSLEPEDFAVYYCQQRSNWPITFGQGTRLEIKRSDPASGAGSGSGSAGPSMGSSPPPTGPISTPAGPEDQPLTPTGSDPQSGLGRHLGVVIGILVAVVLLLLLLLLLFLILRHRRQGKHWTSTQRKADFQHPAGAVGPEPTDRGLQWRSSPAADAQEENLYAAVKDTQPEDGVEMDTRAAASEAPQDVTYAQLHSLTLRRKATEPPPSQEREPPAEPSIYATLAIHSHG

SEQ ID NO: 1860 - protein, 496 aa, Artificial Sequence
  source: /note="Description of Artificial Sequence: Synthetic Chimeric Antigen Receptor sequence"
MALPVTALLLPLALLLHAARPEVQLVESGAEVKKPGASVKVSCKASGYTFTGYYMHWVRQAPGQGLEWMGWINPNSGGTNYAQKFQGRVTMTRDTSISTAYMELSRLRSDDTAVYYCAREPASSSWYGYYYYMDVWGKGTLVTVSSGGGGSGGGGSGGGGSGGGGSDIQMTQSPSSLSASVGDRVTITCRASQSINTYLNWYQQKPGKPPKLLIYAASNLQSGVPSRFSGSGSGTHFTLTISSLQPDDFATYYCQQSYSSLLTFGGGTKLEIKTTTPAPRPPTPAPTIASQPLSLRPEACRPAAGGAVHTRGLDFACDIYIWAPLAGTCGVLLLSLVITLYCKRGRKKLLYIFKQPFMRPVQTTQEEDGCSCRFPEEEEGGCELRVKFSRSADAPAYKQGQNQLYNELNLGRREEYDVLDKRRGRDPEMGGKPRRKNPQEGLYNELQKDKMAEAYSEIGMKGERRRGKGHDGLYQGLSTATKDTYDALHMQALPPR

SEQ ID NO: 1861 - protein, 498 aa, Artificial Sequence
  source: /note="Description of Artificial Sequence: Synthetic Chimeric Antigen Receptor sequence"
MALPVTALLLPLALLLHAARPGSGSGAQAAEVQLVESGGGLVQPGRSLRLSCAASGFTFNDYAMHWVRQAPGKGLEWVSTISWNSGSIGYADSVKGRFTISRDNAKKSLYLQMNSLRAEDTALYYCAKDIQYGNYYYGMDVWGQGTTVTVSSGGGGSGGGGSGGGGSEIVLTQSPATLSLSPGERATLSCRASQSVSSYLAWYQQKPGQAPRLLIYDASNRATGIPARFSGSGSGTDFTLTISSLEPEDFAVYYCQQRSNWPITFGQGTRLEIKRSDPASGAGSGSGSAKNESAASSTGKTPAAEETVTTILGMLASPYHYLIIIVVLVIILAVVVVGFSCRKKFISYLKGICSGGGGGPERVHRVLFRRRSCPSRVPGAEDNARNETLSNRYLQPTQVSEQEIQGQELAELTGVTVELPEEPQRLLEQAEAEGCQRRRLLVPVNDADSADISTLLDASATLEEGHAKETIQDQLVGSEKLFYEEDEAGSATSCLSHG

SEQ ID NO: 1862 - protein, 504 aa, Artificial Sequence
  source: /note="Description of Artificial Sequence: Synthetic Chimeric Antigen Receptor sequence"
MALPVTALLLPLALLLHAARPGSGSGAQAAEVQLVESGGGLVQPGRSLRLSCAASGFTFNDYAMHWVRQAPGKGLEWVSTISWNSGSIGYADSVKGRFTISRDNAKKSLYLQMNSLRAEDTALYYCAKDIQYGNYYYGMDVWGQGTTVTVSSGGGGSGGGGSGGGGSEIVLTQSPATLSLSPGERATLSCRASQSVSSYLAWYQQKPGQAPRLLIYDASNRATGIPARFSGSGSGTDFTLTISSLEPEDFAVYYCQQRSNWPITFGQGTRLEIKRSDPASGAGSGSGSAGHSGGSSLPPTGPPSTPGLGRYLEVLIGVSVAFVLLLFLLLFLLLRRQRHSKHRTSDQRKTDFQRPAGAAETEPKDRGLLRRSSPAADVQEENLYAAVKDTQSEDRVELDSQSPHDEDPQAVTYAPVKHSSPRREMASPPSSLSGEFLDTKDRQVEEDRQMDTEAAASEASQDVTYAQLHSLTLRRKATEPPPSQEGEPPAEPSIYATLAIHSHG

SEQ ID NO: 1863 - protein, 513 aa, Artificial Sequence
  source: /note="Description of Artificial Sequence: Synthetic Chimeric Antigen Receptor sequence"
MALPVTALLLPLALLLHAARPGSGSGAQAAEVQLVESGGGLVQPGRSLRLSCAASGFTFNDYAMHWVRQAPGKGLEWVSTISWNSGSIGYADSVKGRFTISRDNAKKSLYLQMNSLRAEDTALYYCAKDIQYGNYYYGMDVWGQGTTVTVSSGGGGSGGGGSGGGGSEIVLTQSPATLSLSPGERATLSCRASQSVSSYLAWYQQKPGQAPRLLIYDASNRATGIPARFSGSGSGTDFTLTISSLEPEDFAVYYCQQRSNWPITFGQGTRLEIKRSDPASGAGSGSGSAVYSLPQLLGPSCSWEAEGLHCRCSFRAWPAPSLCWRLEEKPLEGNSSQGSFKVNSSSPGPWANSSLILHGGLNSDLKVSCKAWNIYGSQSGSVLLLQGRSNLGTGVVPAALGGAGVMALLCICLCLIFFLIVKARRKQAAGRPEKMDDEDPIMGTITSGSRKKPWPDSPGDQASPPGDAPPLEEQKELHYASLSFSEMKSREPKDQEAPSTTEYSEIKTSKSHG

SEQ ID NO: 1864 - protein, 522 aa, Artificial Sequence
  source: /note="Description of Artificial Sequence: Synthetic Chimeric Antigen Receptor sequence"
MALPVTALLLPLALLLHAARPGSGSGAQAAEVQLVESGGGLVQPGRSLRLSCAASGFTFNDYAMHWVRQAPGKGLEWVSTISWNSGSIGYADSVKGRFTISRDNAKKSLYLQMNSLRAEDTALYYCAKDIQYGNYYYGMDVWGQGTTVTVSSGGGGSGGGGSGGGGSEIVLTQSPATLSLSPGERATLSCRASQSVSSYLAWYQQKPGQAPRLLIYDASNRATGIPARFSGSGSGTDFTLTISSLEPEDFAVYYCQQRSNWPITFGQGTRLEIKRSDPASGAGSGSGSAGSLEGPRPSPTRSVSTAAGPEDQPLMPTGSVPHSGLRRHWEVLIGVLVVSILLLSLLLFLLLQHWRQGKHRTLAQRQADFQRPPGAAEPEPKDGGLQRRSSPAADVQGENFCAAVKNTQPEDGVEMDTRQSPHDEDPQAVTYAKVKHSRPRREMASPPSPLSGEFLDTKDRQAEEDRQMDTEAAASEAPQDVTYAQLHSFTLRQKATEPPPSQEGASPAEPSVYATLAIHSHG

SEQ ID NO: 1865 - protein, 531 aa, Artificial Sequence
  source: /note="Description of Artificial Sequence: Synthetic Chimeric Antigen Receptor sequence"
MALPVTALLLPLALLLHAARPGSGSGAQAAEVQLVESGGGLVQPGRSLRLSCAASGFTFNDYAMHWVRQAPGKGLEWVSTISWNSGSIGYADSVKGRFTISRDNAKKSLYLQMNSLRAEDTALYYCAKDIQYGNYYYGMDVWGQGTTVTVSSGGGGSGGGGSGGGGSEIVLTQSPATLSLSPGERATLSCRASQSVSSYLAWYQQKPGQAPRLLIYDASNRATGIPARFSGSGSGTDFTLTISSLEPEDFAVYYCQQRSNWPITFGQGTRLEIKRSDPASGAGSGSGSAVHKESGNGHNIWVILVVTLVVPLLLVAVLIVCCCIGSGCGGDPKCMDRVCFWRLGLLRGPGAEDNAHNEILSNADSLSTFVSEQQMESQEPADLTGVTVQSPGEAQCLLGPAEAEGSQRRRLLVPANGADPTETLMLFFDKFANIVPFDSWDQLMRQLDLTKNEIDVVRAGTAGPGDALYAMLMKWVNKTGRNASIHTLLDALERMEERHAKEKIQDLLVDSGKFIYLEDGTGSAVSLESHG

SEQ ID NO: 1866 - protein, 538 aa, Artificial Sequence
  source: /note="Description of Artificial Sequence: Synthetic Chimeric Antigen Receptor sequence"
MALPVTALLLPLALLLHAARPGSGSGAQAAEVQLVESGGGLVQPGRSLRLSCAASGFTFNDYAMHWVRQAPGKGLEWVSTISWNSGSIGYADSVKGRFTISRDNAKKSLYLQMNSLRAEDTALYYCAKDIQYGNYYYGMDVWGQGTTVTVSSGGGGSGGGGSGGGGSEIVLTQSPATLSLSPGERATLSCRASQSVSSYLAWYQQKPGQAPRLLIYDASNRATGIPARFSGSGSGTDFTLTISSLEPEDFAVYYCQQRSNWPITFGQGTRLEIKRSDPASGAGSGSGSAVHYPPQLLGPSCSWEAEGLHCSCSSQASPAPSLRWWLGEELLEGNSSQGSFEVTPSSAGPWANSSLSLHGGLSSGLRLRCKAWNVHGAQSGSVFQLLPGKLEHGGGLGLGAALGAGVAALLAFCSCLVVFRVKICRKEARKRAAAEQDVPSTLGPISQGHQHECSAGSSQDHPPPGAATYTPGKGEEQELHYASLSFQGLRLWEPADQEAPSTTEYSEIKIHTGQPLRGPGFGLQLEREMSGMVPKSHG

SEQ ID NO: 1867 - protein, 548 aa, Artificial Sequence
  source: /note="Description of Artificial Sequence: Synthetic Chimeric Antigen Receptor sequence"
MALPVTALLLPLALLLHAARPGSGSGAQAAEVQLVESGGGLVQPGRSLRLSCAASGFTFNDYAMHWVRQAPGKGLEWVSTISWNSGSIGYADSVKGRFTISRDNAKKSLYLQMNSLRAEDTALYYCAKDIQYGNYYYGMDVWGQGTTVTVSSGGGGSGGGGSGGGGSEIVLTQSPATLSLSPGERATLSCRASQSVSSYLAWYQQKPGQAPRLLIYDASNRATGIPARFSGSGSGTDFTLTISSLEPEDFAVYYCQQRSNWPITFGQGTRLEIKRSDPASGAGSGSGSAVHYSPKLLGPSCSWEAEGLHCSCSSQASPAPSLRWWLGEELLEGNSSQDSFEVTPSSAGPWANSSLSLHGGLSSGLRLRCEAWNVHGAQSGSILQLPDKKGLISTAFSNGAFLGIGITALLFLCLALIIMKILPKRRTQTETPRPRFSRHSTILDYINVVPTAGPLAQKRNQKATPNSPRTPLPPGAPSPESKKNQKKQYQLPSFPEPKSSTQAPESQESQEELHYATLNFPGVRPRPEARMPKGTQADYAEVKFQSHG

SEQ ID NO: 1868 - protein, 554 aa, Artificial Sequence
  source: /note="Description of Artificial Sequence: Synthetic Chimeric Antigen Receptor sequence"
MALPVTALLLPLALLLHAARPGSGSGAQAAEVQLVESGGGLVQPGRSLRLSCAASGFTFNDYAMHWVRQAPGKGLEWVSTISWNSGSIGYADSVKGRFTISRDNAKKSLYLQMNSLRAEDTALYYCAKDIQYGNYYYGMDVWGQGTTVTVSSGGGGSGGGGSGGGGSEIVLTQSPATLSLSPGERATLSCRASQSVSSYLAWYQQKPGQAPRLLIYDASNRATGIPARFSGSGSGTDFTLTISSLEPEDFAVYYCQQRSNWPITFGQGTRLEIKRSDPASGAGSGSGSAVHKESGTKHSGEAPAVEETVTSSPGTPASPCSLSGIIIGVTVAAVVLIVAVFVCKSLLWKKVLPYLKGICSGGGGDPERVDRSSQRPGAEDNVLNEIVSILQPTQVPEQEMEVQEPAEPTGVNMLSPGESEHLLEPAEAERSQRRRLLVPANEGDPTETLRQCFDDFADLVPFDSWEPLMRKLGLMDNEIKVAKAEAAGHRDTLYTMLIKWVNKTGRDASVHTLLDALETLGERLAKQKIEDHLLSSGKFMYLEGNADSAMSSHG

SEQ ID NO: 1869 - protein, 284 aa, Artificial Sequence
  source: /note="Description of Artificial Sequence: Synthetic Chimeric Antigen Receptor sequence"
MALPVTALLLPLALLLHAARPEVQLQQSGPGLVKPSQTLSLTCAISGDSVLSNSDTWNWIRQSPSRGLEWLGRTYHRSTWYDDYASSVRGRVSINVDTSKNQYSLQLNAVTPEDTGAYYCARDRLQDGNSWSDAFDVWGQGTMVTVSSGGGGSGGGGSGGGGSQSALTQPASVSGSPGQSITISCTGTSSDVGGYNYVSWYQQHPGKAPKLMIYDVSNRPSGVSNRFSGSKSGNTASLTISGLQAEDEADYYCSSYTSSSTPYVFGTGTQLTVLGSHHHHHHHH

SEQ ID NO: 1870 - protein, 485 aa, Artificial Sequence
  source: /note="Description of Artificial Sequence: Synthetic Chimeric Antigen Receptor sequence"
MALPVTALLLPLALLLHAARPEVQLVESGGGLVKPGGSLRLSCVASGFTFSNAWMNWVRQAPGKGLEWVGRIKSKTDGGTADYAAPVKGRFTISRDDSKNTMYLQMNSLKTEDTGVYYCITGATDVWGQGTTVTVSSGGGGSGGGGSGGGGSSYVLTQPPSASGTPGQRVTISCSGSSSNIGSNYVYWYQQLPGTAPKLLIYRNNQRPSGVPDRFSGSKSGTSASLAISGLRSEDEADYYCAAWDDSLSGPVFGGGTKLTVLTTTPAPRPPTPAPTIASQPLSLRPEACRPAAGGAVHTRGLDFACDIYIWAPLAGTCGVLLLSLVITLYCKRGRKKLLYIFKQPFMRPVQTTQEEDGCSCRFPEEEEGGCELRVKFSRSADAPAYKQGQNQLYNELNLGRREEYDVLDKRRGRDPEMGGKPRRKNPQEGLYNELQKDKMAEAYSEIGMKGERRRGKGHDGLYQGLSTATKDTYDALHMQALPPR

SEQ ID NO: 1871 - protein, 485 aa, Artificial Sequence
  source: /note="Description of Artificial Sequence: Synthetic Chimeric Antigen Receptor sequence"
MALPVTALLLPLALLLHAARPQVQLVQSGAEVKKPGASVKVSCKASGYTFTSYYMHWVRQAPGQGLEWMGIINPSGGSTSYAQKFQGRVTMTRDTSTSTVYMELSSLRSEDTAVYYCARGDYYMDVWGKGTTVTVSSGGGGSGGGGSGGGGSQSALTQPASASGSPGQSVTISCTGTSSDVGGYNYVSWYQQHPGKAPKLMIYEVSKRPSGVPDRFSGSKSGNTASLTISGLQAEDEADYYCSSYTSSGTLVFGGGTKLTVLTTTPAPRPPTPAPTIASQPLSLRPEACRPAAGGAVHTRGLDFACDIYIWAPLAGTCGVLLLSLVITLYCKRGRKKLLYIFKQPFMRPVQTTQEEDGCSCRFPEEEEGGCELRVKFSRSADAPAYKQGQNQLYNELNLGRREEYDVLDKRRGRDPEMGGKPRRKNPQEGLYNELQKDKMAEAYSEIGMKGERRRGKGHDGLYQGLSTATKDTYDALHMQALPPR

SEQ ID NO: 1872 - protein, 486 aa, Artificial Sequence
  source: /note="Description of Artificial Sequence: Synthetic Chimeric Antigen Receptor sequence"
MALPVTALLLPLALLLHAARPQVQLVQSGAEVKKPGASVKVSCKASGYTFTSYYMHWVRQAPGQGLEWMGIINPSGGSTSYAQKFQGRVTMTRDTSTSTVYMELSSLRSEDTAVYYCARDLDVSLDIWGQGTMVTVSSGGGGSGGGGSGGGGSQSALTQPASVSGSPGQSITISCSGTSSDVGGYNSVSWYQQYPGKAPKLMIYDVNNRPSGVSSRFSGSKSGNTASLTISGLQAEDEADYYCSSYTSSSTLFFGAGTKVTVLTTTPAPRPPTPAPTIASQPLSLRPEACRPAAGGAVHTRGLDFACDIYIWAPLAGTCGVLLLSLVITLYCKRGRKKLLYIFKQPFMRPVQTTQEEDGCSCRFPEEEEGGCELRVKFSRSADAPAYKQGQNQLYNELNLGRREEYDVLDKRRGRDPEMGGKPRRKNPQEGLYNELQKDKMAEAYSEIGMKGERRRGKGHDGLYQGLSTATKDTYDALHMQALPPR

SEQ ID NO: 1873 - protein, 487 aa, Artificial Sequence
  source: /note="Description of Artificial Sequence: Synthetic Chimeric Antigen Receptor sequence"
MALPVTALLLPLALLLHAARPEVQLVESGAEVKKPGASVKVSCKASGYTFTSYYMHWVRQAPGQGLEWMGIINPSGGSTSYAQKFQGRVTMTRDTSTSTAYMELSSLRSEDTAVYYCAREAGVVAVDYWGQGTLVTVSSGGGGSGGGGSGGGGSQSALTQPASVSGSPGQSITISCTGTSSDVGGYNYVSWYQQHPGKAPKLMIYDVSNRPSGVSNRFSGSKSGNTASLTISGLQAEDEADYYCSSYTSSSTWVFGGGTKLTVLTTTPAPRPPTPAPTIASQPLSLRPEACRPAAGGAVHTRGLDFACDIYIWAPLAGTCGVLLLSLVITLYCKRGRKKLLYIFKQPFMRPVQTTQEEDGCSCRFPEEEEGGCELRVKFSRSADAPAYKQGQNQLYNELNLGRREEYDVLDKRRGRDPEMGGKPRRKNPQEGLYNELQKDKMAEAYSEIGMKGERRRGKGHDGLYQGLSTATKDTYDALHMQALPPR

SEQ ID NO: 1874 - protein, 488 aa, Artificial Sequence
  source: /note="Description of Artificial Sequence: Synthetic Chimeric Antigen Receptor sequence"
MALPVTALLLPLALLLHAARPEVQLVESGAEVKKPGSSVKVSCKASGGTFSSYAISWVRQAPGQGLEWMGGIIPIFGTANYAQKFQGRVTITADESTSTAYMELSSLRSEDTAVYYCARDHKVVRFGYWGQGTLVTVSSGGGGSGGGGSGGGGSHVILTQPPSASASLGASVKLTCTLSSGHSSYAIAWHQQQPEKGPRYLMKVNSDGSLSKGDGIPDRFSGSTSGAERYLTISSLQSEDEADYYCQTWGSGMAIFGGGTKLTVLTTTPAPRPPTPAPTIASQPLSLRPEACRPAAGGAVHTRGLDFACDIYIWAPLAGTCGVLLLSLVITLYCKRGRKKLLYIFKQPFMRPVQTTQEEDGCSCRFPEEEEGGCELRVKFSRSADAPAYKQGQNQLYNELNLGRREEYDVLDKRRGRDPEMGGKPRRKNPQEGLYNELQKDKMAEAYSEIGMKGERRRGKGHDGLYQGLSTATKDTYDALHMQALPPR

SEQ ID NO: 1875 - protein, 488 aa, Artificial Sequence
  source: /note="Description of Artificial Sequence: Synthetic Chimeric Antigen Receptor sequence"
MALPVTALLLPLALLLHAARPQVQLVQSGAEVKKPGASVKVSCKASGYTFTSYYMHWVRQAPGQGLEWMGIINPSGGSTSYAQKFQGRVTMTRDTSISTAYMELSRLRSDDTAVYYCAREMDDSSGPDYWGQGTLVTVSSGGGGSGGGGSGGGGSQSALTQPASVSGSPGQSITISCTGTSSDVGGYNYVSWYQQHPGKAPKLMIYEVSNRPSGVSNRFSGSKSGNTASLTISGLQAEDEADYYCSSYTSSSTLVFGTGTKLTVLTTTPAPRPPTPAPTIASQPLSLRPEACRPAAGGAVHTRGLDFACDIYIWAPLAGTCGVLLLSLVITLYCKRGRKKLLYIFKQPFMRPVQTTQEEDGCSCRFPEEEEGGCELRVKFSRSADAPAYKQGQNQLYNELNLGRREEYDVLDKRRGRDPEMGGKPRRKNPQEGLYNELQKDKMAEAYSEIGMKGERRRGKGHDGLYQGLSTATKDTYDALHMQALPPR

SEQ ID NO: 1876 - protein, 489 aa, Artificial Sequence
  source: /note="Description of Artificial Sequence: Synthetic Chimeric Antigen Receptor sequence"
MALPVTALLLPLALLLHAARPEVQLVESGGGLVQPGRSLRLSCAASGFTFDDYAMHWVRQAPGKGLEWVSGISWNSGSIGYADSVKGRFTISRDNAKNSLYLQMNSLRAEDTALYYCAKDKGGGYYDFWSGSDYWGQGTLVTVSSGGGGSGGGGSGGGGSSSELTQDPAVSVALGQTVRITCQGDSLRSYYASWYQQKPGQAPVLVIYGKNNRPSGIPDRFSGSSSGNTASLTITGAQAEDEADYYCNSRDSSGWVFGGGTKLTVLTTTPAPRPPTPAPTIASQPLSLRPEACRPAAGGAVHTRGLDFACDIYIWAPLAGTCGVLLLSLVITLYCKRGRKKLLYIFKQPFMRPVQTTQEEDGCSCRFPEEEEGGCELRVKFSRSADAPAYKQGQNQLYNELNLGRREEYDVLDKRRGRDPEMGGKPRRKNPQEGLYNELQKDKMAEAYSEIGMKGERRRGKGHDGLYQGLSTATKDTYDALHMQALPPR

SEQ ID NO: 1877 - protein, 489 aa, Artificial Sequence
  source: /note="Description of Artificial Sequence: Synthetic Chimeric Antigen Receptor sequence"
MALPVTALLLPLALLLHAARPQVQLQESGPGLVKPSETLSLTCTVSGGSISSSSYYWGWIRQPPGKGLEWIGSIYYSGSTYYNPSLKSRVTISVDTSKNQFSLKLSSVTAADTAVYYCARGRMDTAMAQIWGQGTMVTVSSGDGGSGGGGSGGGGSNFMLTQPHSVSESPGKTVTIPCTGSSGSFASSYVQWYQQRPGSAPATVIYEDNQRPSGVPDRFSGSVDSSSNSASLTISGLKTEDEAVYYCQSYDGATWVFGGGTKLTVLTTTPAPRPPTPAPTIASQPLSLRPEACRPAAGGAVHTRGLDFACDIYIWAPLAGTCGVLLLSLVITLYCKRGRKKLLYIFKQPFMRPVQTTQEEDGCSCRFPEEEEGGCELRVKFSRSADAPAYKQGQNQLYNELNLGRREEYDVLDKRRGRDPEMGGKPRRKNPQEGLYNELQKDKMAEAYSEIGMKGERRRGKGHDGLYQGLSTATKDTYDALHMQALPPR

SEQ ID NO: 1878 - protein, 489 aa, Artificial Sequence
  source: /note="Description of Artificial Sequence: Synthetic Chimeric Antigen Receptor sequence"
MALPVTALLLPLALLLHAARPQVQLVQSGAEVKKPGASVKVSCKASGYTFTSYYMHWVRQAPGQGLEWMGIINPSGGSTSYAQKFQGRVTMTRDTSTSTVYMELSSLRSEDTAVYYCARGSGSLGDAFDIWGQGTMVTVSSGGGGSGGGGSGGGGSQSALTQPASVSGSPGQSITISCTGSSSDVGGYNYVSWYQQHPGKAPKLMIYEVSNRPSGVSNRFSGSKSGNTASLTISGLQAEDEADYYCSSYTSSSTLVFGTGTKVTVLTTTPAPRPPTPAPTIASQPLSLRPEACRPAAGGAVHTRGLDFACDIYIWAPLAGTCGVLLLSLVITLYCKRGRKKLLYIFKQPFMRPVQTTQEEDGCSCRFPEEEEGGCELRVKFSRSADAPAYKQGQNQLYNELNLGRREEYDVLDKRRGRDPEMGGKPRRKNPQEGLYNELQKDKMAEAYSEIGMKGERRRGKGHDGLYQGLSTATKDTYDALHMQALPPR

SEQ ID NO: 1879 - protein, 490 aa, Artificial Sequence
  source: /note="Description of Artificial Sequence: Synthetic Chimeric Antigen Receptor sequence"
MALPVTALLLPLALLLHAARPEVQLVESGGGLVQPGRSLRLSCAASGFTFDDYAMHWVRQAPGKGLEWVSGISWNSGSIGYADSVKGRFTISRDNAKNSLYLQMNSLRAEDTALYYCAKGLSSWHFHDALDIWGQGTMVTVSSGGGGSGGGGSGGGGSSSELTQDPAVSVALGQTVRITCQGDSLRSYYASWYQQKPGQAPVLVIYGKNNRPSGIPDRFSGSSSGNTASLTITGAQAEDEADYYCNSRDSSGNHLWVFGGGTKLTVLTTTPAPRPPTPAPTIASQPLSLRPEACRPAAGGAVHTRGLDFACDIYIWAPLAGTCGVLLLSLVITLYCKRGRKKLLYIFKQPFMRPVQTTQEEDGCSCRFPEEEEGGCELRVKFSRSADAPAYKQGQNQLYNELNLGRREEYDVLDKRRGRDPEMGGKPRRKNPQEGLYNELQKDKMAEAYSEIGMKGERRRGKGHDGLYQGLSTATKDTYDALHMQALPPR

SEQ ID NO: 1880 - protein, 490 aa, Artificial Sequence
  source: /note="Description of Artificial Sequence: Synthetic Chimeric Antigen Receptor sequence"
MALPVTALLLPLALLLHAARPQVQLVQSGAEVKKPGASVKVSCKASGYTFTSYGISWVRQAPGQGLEWMGWISAYNGNTNYAQKLQGRVTMTTDTSTSTAYMELRSLRSDDTAVYYCASFSSSDSYDYWGQGTLVTVSSGGGGSGGGGSGGGGSGGGGSEIVLTQSPATLSVSPGERATLSCRASQSVTSNLAWYQQKPGQAPRLLIYAASTRATGIPARFSGSGSGTEFTLTISSMQSEDFAVYFCQQYHTWPPLTFGGGTKVEIKTTTPAPRPPTPAPTIASQPLSLRPEACRPAAGGAVHTRGLDFACDIYIWAPLAGTCGVLLLSLVITLYCKRGRKKLLYIFKQPFMRPVQTTQEEDGCSCRFPEEEEGGCELRVKFSRSADAPAYKQGQNQLYNELNLGRREEYDVLDKRRGRDPEMGGKPRRKNPQEGLYNELQKDKMAEAYSEIGMKGERRRGKGHDGLYQGLSTATKDTYDALHMQALPPR

SEQ ID NO: 1881 - protein, 490 aa, Artificial Sequence
  source: /note="Description of Artificial Sequence: Synthetic Chimeric Antigen Receptor sequence"
MALPVTALLLPLALLLHAARPQVQLVQSGAEVKKPGASVKVSCKASGYTFTSYYMHWVRQAPGQGLEWMGIINPSGGSTSYAQKFQGRVTMTRDTSTSTVYMELSSLRAEDTAVYYCARGGYGDYLDAFDIWGQGTTVTVSSGGGGSGGGGSGSGGSQSALTQPASVSGSPGQSITISCTGTSSDVGGYNYVSWYQQHPGKAPKLMIYEVSNRPSGVSNRFSGSKSGNTASLTISGLQAEDEADYYCSSYTSSSTLVFGTGTQLTVLTTTPAPRPPTPAPTIASQPLSLRPEACRPAAGGAVHTRGLDFACDIYIWAPLAGTCGVLLLSLVITLYCKRGRKKLLYIFKQPFMRPVQTTQEEDGCSCRFPEEEEGGCELRVKFSRSADAPAYKQGQNQLYNELNLGRREEYDVLDKRRGRDPEMGGKPRRKNPQEGLYNELQKDKMAEAYSEIGMKGERRRGKGHDGLYQGLSTATKDTYDALHMQALPPR

SEQ ID NO: 1882 - protein, 490 aa, Artificial Sequence
  source: /note="Description of Artificial Sequence: Synthetic Chimeric Antigen Receptor sequence"
MALPVTALLLPLALLLHAARPQVQLVQSGAEVKKPGASVKVSCKASGYTFTSYYMHWVRQAPGQGLEWMGIINPSGGSTSYAQKFQGRVTMTRDTSTSTVYMELSSLRSEDTAVYYCARDDDFWSGSGAFDIWGQGTTVTVSSGGGGSGGGGSGGGGSSSELTQDPAVSVALGQTVRITCQGDSLRSYYASWYQQKPGQAPVLVIYGKNNRPSGIPDRFSGSSSGNTASLTITGAQAEDEADYYCNSRDSSGNHPVVFGGGTKLTVLTTTPAPRPPTPAPTIASQPLSLRPEACRPAAGGAVHTRGLDFACDIYIWAPLAGTCGVLLLSLVITLYCKRGRKKLLYIFKQPFMRPVQTTQEEDGCSCRFPEEEEGGCELRVKFSRSADAPAYKQGQNQLYNELNLGRREEYDVLDKRRGRDPEMGGKPRRKNPQEGLYNELQKDKMAEAYSEIGMKGERRRGKGHDGLYQGLSTATKDTYDALHMQALPPR

SEQ ID NO: 1883 - protein, 490 aa, Artificial Sequence
  source: /note="Description of Artificial Sequence: Synthetic Chimeric Antigen Receptor sequence"
MALPVTALLLPLALLLHAARPQVQLVQSGAEVKKPGASVKVSCKASGYTFTSYYMHWVRQAPGQGLEWMGIINPSGGSTSYAQKFQGRVTMTRDTSTSTVYMELSSLRSEDTAVYYCARDGFGELSGAFDIWGQGTMVTVSSGGGGSGGGGSGGGGSQSALTQPASVSGSPGQSITISCTGTSSDVGGYNYVSWYQQHPGKAPKLMIYDVSNRPSGVSNRFSGSKSGNTASLTISGLQAEDEADYYCSSYASSSTLVFGGGTKVTVLTTTPAPRPPTPAPTIASQPLSLRPEACRPAAGGAVHTRGLDFACDIYIWAPLAGTCGVLLLSLVITLYCKRGRKKLLYIFKQPFMRPVQTTQEEDGCSCRFPEEEEGGCELRVKFSRSADAPAYKQGQNQLYNELNLGRREEYDVLDKRRGRDPEMGGKPRRKNPQEGLYNELQKDKMAEAYSEIGMKGERRRGKGHDGLYQGLSTATKDTYDALHMQALPPR

SEQ ID NO: 1884 - protein, 490 aa, Artificial Sequence
  source: /note="Description of Artificial Sequence: Synthetic Chimeric Antigen Receptor sequence"
MALPVTALLLPLALLLHAARPQVQLVQSGAEVKKPGASVKVSCKASGYTFTSYYMHWVRQAPGQGLEWMGIINPSGGSTSYAQKFQGRVTMTRDTSTSTVYMELSSLRSEDTAVYYCARGSYGDYGDAFDIWGQGTTVTVSSGGGGSGGGGSGSGGSQSALTQPASVSGSPGQSITISCTGTSSDVGGYKYVSWYQQHPGKAPKLMIYDVSNRPSGVSNRFSGSKSGNTASLTISGLQAEDEADYYCSSYTSSSTLVFGGGTKLTVLTTTPAPRPPTPAPTIASQPLSLRPEACRPAAGGAVHTRGLDFACDIYIWAPLAGTCGVLLLSLVITLYCKRGRKKLLYIFKQPFMRPVQTTQEEDGCSCRFPEEEEGGCELRVKFSRSADAPAYKQGQNQLYNELNLGRREEYDVLDKRRGRDPEMGGKPRRKNPQEGLYNELQKDKMAEAYSEIGMKGERRRGKGHDGLYQGLSTATKDTYDALHMQALPPR

SEQ ID NO: 1885 - protein, 491 aa, Artificial Sequence
  source: /note="Description of Artificial Sequence: Synthetic Chimeric Antigen Receptor sequence"
MALPVTALLLPLALLLHAARPEVQLQQSGPGLVKPSLTLSLTCAISGDSVSSNSATWTWIRQSPSRGLEWLGRTYYRSTWYNDYAVSVKSRITINPDTSKNQFSLQLNSVTPEDTAVYYCAREGSGSYYAYWGQGTLVTVSSGGGGSGGGGSGGGGSQSALTQPASVSGSPGQSITISCTGTSSDVGGYNYVSWYQQHPGKAPKLMIYDVSNRPSGVSNRFSGSKSGNTASLTISGLQAEDEADYYCSSYTSSSTLYVFGTGTKVTVLTTTPAPRPPTPAPTIASQPLSLRPEACRPAAGGAVHTRGLDFACDIYIWAPLAGTCGVLLLSLVITLYCKRGRKKLLYIFKQPFMRPVQTTQEEDGCSCRFPEEEEGGCELRVKFSRSADAPAYKQGQNQLYNELNLGRREEYDVLDKRRGRDPEMGGKPRRKNPQEGLYNELQKDKMAEAYSEIGMKGERRRGKGHDGLYQGLSTATKDTYDALHMQALPPR

SEQ ID NO: 1886 - protein, 491 aa, Artificial Sequence
  source: /note="Description of Artificial Sequence: Synthetic Chimeric Antigen Receptor sequence"
MALPVTALLLPLALLLHAARPEVQLVESGAEVKKPGASVKVSCKASGYTFTSYYMHWVRQAPGQGLEWMGIINPSGGSTSYAQKFQGRVTMTRDTSTSTVYMELSSLRSEDTAVYYCARGPIGCSGGSCLDYWGQGTLVTVSSGGGGSGGGGSGGGGSQSALTQPAYVSGSPGQSITISCTGTNSDVGRYNYVSWYQQHPGKAPKLMIYEVSYRPSGVSNRFSGSKSGNTASLTISGLQAEDEADYYCSSYTTSSTLDFGTGTKVTVLTTTPAPRPPTPAPTIASQPLSLRPEACRPAAGGAVHTRGLDFACDIYIWAPLAGTCGVLLLSLVITLYCKRGRKKLLYIFKQPFMRPVQTTQEEDGCSCRFPEEEEGGCELRVKFSRSADAPAYKQGQNQLYNELNLGRREEYDVLDKRRGRDPEMGGKPRRKNPQEGLYNELQKDKMAEAYSEIGMKGERRRGKGHDGLYQGLSTATKDTYDALHMQALPPR

SEQ ID NO: 1887 - protein, 491 aa, Artificial Sequence
  source: /note="Description of Artificial Sequence: Synthetic Chimeric Antigen Receptor sequence"
MALPVTALLLPLALLLHAARPEVQLVESGGGLVKPGGSLRLSCAASGFTFSDYYMSWIRQAPGKGLEWVSYISSSGSTIYYADSVKGRFTISRDNAKNSLYLQMNSLRAEDTAVYYCARDDFWSGSVDYWGQGTLVTVSSGGGGSGGGGSGGGGSGGGGSSYVLTQPPSVSVAPGKTATITCGGTNIGSKNVHWYQQKPGQAPVLAIYYDSDRPSGIPERFSGSNSGNTATLTISRVEAGDEADYFCQVWDSSSDHWVFGGGTKLTVLTTTPAPRPPTPAPTIASQPLSLRPEACRPAAGGAVHTRGLDFACDIYIWAPLAGTCGVLLLSLVITLYCKRGRKKLLYIFKQPFMRPVQTTQEEDGCSCRFPEEEEGGCELRVKFSRSADAPAYKQGQNQLYNELNLGRREEYDVLDKRRGRDPEMGGKPRRKNPQEGLYNELQKDKMAEAYSEIGMKGERRRGKGHDGLYQGLSTATKDTYDALHMQALPPR

SEQ ID NO: 1888 - protein, 491 aa, Artificial Sequence
  source: /note="Description of Artificial Sequence: Synthetic Chimeric Antigen Receptor sequence"
MALPVTALLLPLALLLHAARPEVQLVESGGGLVQPGGSLRLSCAASGFTFSSYAMHWVRQAPGKGLEYVSAISSNGGSTYYANSVKDRFTISRDNSKNTLYLQMGSLRAEDMAVYYCARVHSSGYYHPGPNDYWGQGTLVTVSSGGGGSGGGGSGGGGSSSELTQDPAVSVALGQTVRITCQGDSLRTYYATWYQQKPGQAPVLVFYDENNRPSGIPDRFSGSSSGNTASLTITGTQAEDEADYYCSSRDSSGNPSCVFGGGTKLTVLTTTPAPRPPTPAPTIASQPLSLRPEACRPAAGGAVHTRGLDFACDIYIWAPLAGTCGVLLLSLVITLYCKRGRKKLLYIFKQPFMRPVQTTQEEDGCSCRFPEEEEGGCELRVKFSRSADAPAYKQGQNQLYNELNLGRREEYDVLDKRRGRDPEMGGKPRRKNPQEGLYNELQKDKMAEAYSEIGMKGERRRGKGHDGLYQGLSTATKDTYDALHMQALPPR

SEQ ID NO: 1889 - protein, 491 aa, Artificial Sequence
  source: /note="Description of Artificial Sequence: Synthetic Chimeric Antigen Receptor sequence"
MALPVTALLLPLALLLHAARPEVQLVESGGGLVQPGGSLRLSCAASGFTFSSYAMSWVRQAPGKGLEWVSYISSSSSTIYYADSVKGRFTISRDNAKNSLYLQMNSLRAEDTAVYYCARDGPIRYFDHSKAFDIWGQGTMVTVSSGGGGSGGGGSGGGGSSSELTQDPAVSVALGQTVRITCQGDSLRSYYASWYQQKPGQAPVLVIYGKNNRPSGIPDRFSGSSSGNTASLTITGAQAEDEADYYRNSRDSSGNPYVFGTGTKVTVLTTTPAPRPPTPAPTIASQPLSLRPEACRPAAGGAVHTRGLDFACDIYIWAPLAGTCGVLLLSLVITLYCKRGRKKLLYIFKQPFMRPVQTTQEEDGCSCRFPEEEEGGCELRVKFSRSADAPAYKQGQNQLYNELNLGRREEYDVLDKRRGRDPEMGGKPRRKNPQEGLYNELQKDKMAEAYSEIGMKGERRRGKGHDGLYQGLSTATKDTYDALHMQALPPR

SEQ ID NO: 1890 - protein, 491 aa, Artificial Sequence
  source: /note="Description of Artificial Sequence: Synthetic Chimeric Antigen Receptor sequence"
MALPVTALLLPLALLLHAARPQVQLVQSGAEVKKPGASVKVSCKASGYTFTGYYMHWVRQAPGQGLEWMGWINPNSGGTNYAQKFQGRVTMTRDTSISTAYMELSRLRSDDTAVYYCARDYWGYYGSGTLDYWGQGTLVTVSSGGGGSGGGGSGGGGSQSALTQPGSVSGSPGQSITISCTGTSSDVGGYNYVSWYQQHPGKAPKLIIYDVSSRPSGVSNRFSGSQSGNTASLTISGLQAEDEADYSCSSYAGSNTLVFGTGTKVTVLTTTPAPRPPTPAPTIASQPLSLRPEACRPAAGGAVHTRGLDFACDIYIWAPLAGTCGVLLLSLVITLYCKRGRKKLLYIFKQPFMRPVQTTQEEDGCSCRFPEEEEGGCELRVKFSRSADAPAYKQGQNQLYNELNLGRREEYDVLDKRRGRDPEMGGKPRRKNPQEGLYNELQKDKMAEAYSEIGMKGERRRGKGHDGLYQGLSTATKDTYDALHMQALPPR

SEQ ID NO: 1891 - protein, 491 aa, Artificial Sequence
  source: /note="Description of Artificial Sequence: Synthetic Chimeric Antigen Receptor sequence"
MALPVTALLLPLALLLHAARPQVQLVQSGAEVKKPGASVKVSCKASGYTFTSYYMHWVRQAPGQGLEWMGIINPSGGSTSYAQKFQGRVTMTRDTSTSTVYMELSSLRSEDTAVYYCARDLAAAGNYYYYGMDVWGQGTTVTVSSGGGGSGGGGSGGGGSSSELTQDPAVSVALGQTARITCQGDSLRSYFTSWYHQKPGQAPVLVIYGNNNRPSGIPDRFSGSSSGNTASLTITGAQAEDEGDYYCDSRDSSGDHLVFGGGTKLTVLTTTPAPRPPTPAPTIASQPLSLRPEACRPAAGGAVHTRGLDFACDIYIWAPLAGTCGVLLLSLVITLYCKRGRKKLLYIFKQPFMRPVQTTQEEDGCSCRFPEEEEGGCELRVKFSRSADAPAYKQGQNQLYNELNLGRREEYDVLDKRRGRDPEMGGKPRRKNPQEGLYNELQKDKMAEAYSEIGMKGERRRGKGHDGLYQGLSTATKDTYDALHMQALPPR

SEQ ID NO: 1892 - protein, 492 aa, Artificial Sequence
  source: /note="Description of Artificial Sequence: Synthetic Chimeric Antigen Receptor sequence"
MALPVTALLLPLALLLHAARPQVQLQESGPGLVKPSGTLSLTCAVSGASITSRHWWNWVRHSPGKGLEWIGQIYHSGTTTYNPSLGSRVTISVDKSKNQISLELRSVTAADTATYYCVRDYLELATYYGMDVWGQGTTVTVSSGGGGSGGGGSGGGGSEIVLTQSPLSLPVTPGEPASISCRSSQSLLYSDGYNYLDWYLQKPGQSPQLLIYLGSNRASGVPDRFSGSGSGTDFTLQISGVETEDVGVYYCMQALQTQSFGQGTKLEIKTTTPAPRPPTPAPTIASQPLSLRPEACRPAAGGAVHTRGLDFACDIYIWAPLAGTCGVLLLSLVITLYCKRGRKKLLYIFKQPFMRPVQTTQEEDGCSCRFPEEEEGGCELRVKFSRSADAPAYKQGQNQLYNELNLGRREEYDVLDKRRGRDPEMGGKPRRKNPQEGLYNELQKDKMAEAYSEIGMKGERRRGKGHDGLYQGLSTATKDTYDALHMQALPPR

SEQ ID NO: 1893 - protein, 492 aa, Artificial Sequence
  source: /note="Description of Artificial Sequence: Synthetic Chimeric Antigen Receptor sequence"
MALPVTALLLPLALLLHAARPQVQLVQSGAEVKKPGASVKVSCKASGYTFTSYYMHWVRQAPGQGLEWMGIINPSGGSTSYAQKFQGRVTMTRDTSTSTVYMELSSLRSEDTAVYYCARPEGVSYYDSSVLDYWGQGTLVTVSSGGGGSGGGGSGGGGSQSALTQPASVSGSPGQSITISCTGTSSDVGGYKHVSWYQHHPGKAPKLMIYDVSNRPSGVSNRFSGSKSGNTASLTVSGLQAEDEAHYYCVSYRNFNSLVFGTGTKVTVLTTTPAPRPPTPAPTIASQPLSLRPEACRPAAGGAVHTRGLDFACDIYIWAPLAGTCGVLLLSLVITLYCKRGRKKLLYIFKQPFMRPVQTTQEEDGCSCRFPEEEEGGCELRVKFSRSADAPAYKQGQNQLYNELNLGRREEYDVLDKRRGRDPEMGGKPRRKNPQEGLYNELQKDKMAEAYSEIGMKGERRRGKGHDGLYQGLSTATKDTYDALHMQALPPR

SEQ ID NO: 1894 - protein, 493 aa, Artificial Sequence
  source: /note="Description of Artificial Sequence: Synthetic Chimeric Antigen Receptor sequence"
MALPVTALLLPLALLLHAARPEVQLQQSGPGLVKPSQTLSLTCAISGDSVSSNSAAWNWIRQSPSRGLEWLGRTYYRSKWYNDYAVSVKSRITINPDTSKNQFSLQLNSVTPEDTAVYYCAREESSSGWYEGNWFDPWGQGTLVTVSSGGGGSGGGGSGGGGSSSELTQDPAVSVALGQTVRITCQGDSLRSYYASWYQQKPGQAPVLVIYGKNHRPSGIPDRFSGSSSGDTDSLTITGAQAEDEADYYCHSRDSSGNHLFGGGTKLTVLTTTPAPRPPTPAPTIASQPLSLRPEACRPAAGGAVHTRGLDFACDIYIWAPLAGTCGVLLLSLVITLYCKRGRKKLLYIFKQPFMRPVQTTQEEDGCSCRFPEEEEGGCELRVKFSRSADAPAYKQGQNQLYNELNLGRREEYDVLDKRRGRDPEMGGKPRRKNPQEGLYNELQKDKMAEAYSEIGMKGERRRGKGHDGLYQGLSTATKDTYDALHMQALPPR

SEQ ID NO: 1895 - protein, 494 aa, Artificial Sequence
  source: /note="Description of Artificial Sequence: Synthetic Chimeric Antigen Receptor sequence"
MALPVTALLLPLALLLHAARPQVQLQESGPGLVKPSETLSLTCSVSGGSINSYYWSWIRQAPGKGLEWIAFTSHSGNVKYNPSLTGRVTIAVDTSKNQFYLEVTSVTAADTAVYFCARGLDPLFAYDAFEIWGLGTMVTVSSGGGGSGGGGSGGGGSEIVLTQSPLSLPVTPGEPASISCRSSQSLLHSNGYNYLDWYLQKPGQSPQLLIYLGSNRASGVPDRFSGSGSGTDFTLKISRVEAEDVGVYYCMQVLQTPPLTFGGGTKVDIKRTTTPAPRPPTPAPTIASQPLSLRPEACRPAAGGAVHTRGLDFACDIYIWAPLAGTCGVLLLSLVITLYCKRGRKKLLYIFKQPFMRPVQTTQEEDGCSCRFPEEEEGGCELRVKFSRSADAPAYKQGQNQLYNELNLGRREEYDVLDKRRGRDPEMGGKPRRKNPQEGLYNELQKDKMAEAYSEIGMKGERRRGKGHDGLYQGLSTATKDTYDALHMQALPPR

SEQ ID NO: 1896 - protein, 494 aa, Artificial Sequence
  source: /note="Description of Artificial Sequence: Synthetic Chimeric Antigen Receptor sequence"
MALPVTALLLPLALLLHAARPQVQLVQSGAEVKKPGASVKVSCKASGYTFTSYYMHWVRQAPGQGLEWMGIINPSGGSTSYAQKFQGRVTMTRDTSTSTVYMELSSLRSEDTAVYYCAREDDSSGYTSPFDYWGQGTLVTVSSGGGGSGGGGSGGGGSGGGRSSYELTQPPSVSVAPGETASIACGGHNIRSKNVHWYQQKPGQAPVLVISYDGDRPSGIPERFSGSNLGSTATLTISRVEAGDEADYYCQVWDSDSDHYVFGTGTKVTVLTTTPAPRPPTPAPTIASQPLSLRPEACRPAAGGAVHTRGLDFACDIYIWAPLAGTCGVLLLSLVITLYCKRGRKKLLYIFKQPFMRPVQTTQEEDGCSCRFPEEEEGGCELRVKFSRSADAPAYKQGQNQLYNELNLGRREEYDVLDKRRGRDPEMGGKPRRKNPQEGLYNELQKDKMAEAYSEIGMKGERRRGKGHDGLYQGLSTATKDTYDALHMQALPPR

SEQ ID NO: 1897 - protein, 494 aa, Artificial Sequence
  source: /note="Description of Artificial Sequence: Synthetic Chimeric Antigen Receptor sequence"
MALPVTALLLPLALLLHAARPQVQLVQSGGGVVQPGRSLRLSCAASGFTFSSYAMSWVRQAPGKGLEWVSAISGSGGSTYYADSVKGRFTISRDNSKNTLYLQMNSLRAEDTAVYYCAKEPLFGVVEEDVDYWGQGTLVTVSSGGGGSGGGGSGGGGSDVVMTQSPLSLPVTPGEPASISCRSSQSLLAGNGHNYLDWYLQKPGQSPQLLIYLGSNRASGVPDRFSGSGSGTDFTLKISRVEAEDVGVYYCMQALQNPLTFGGGTKLEIKRTTTPAPRPPTPAPTIASQPLSLRPEACRPAAGGAVHTRGLDFACDIYIWAPLAGTCGVLLLSLVITLYCKRGRKKLLYIFKQPFMRPVQTTQEEDGCSCRFPEEEEGGCELRVKFSRSADAPAYKQGQNQLYNELNLGRREEYDVLDKRRGRDPEMGGKPRRKNPQEGLYNELQKDKMAEAYSEIGMKGERRRGKGHDGLYQGLSTATKDTYDALHMQALPPR

SEQ ID NO: 1898 - protein, 495 aa, Artificial Sequence
  source: /note="Description of Artificial Sequence: Synthetic Chimeric Antigen Receptor sequence"
MALPVTALLLPLALLLHAARPEVQLQQSGPGLVKPSQTLSLTCAISGDSVSSNSAAWNWIRQSPSRGLEWLGRTYYRSKWYNDYAVSVKSRITINPDTSKNQFSLQLNSVTPEDTAVYYCARDLGWIAVAGTFDYWGQGTLVTVSSGGGGSGGGGSGGGGSQSALTQPASVSGSPGQSITISCTGTSSDVGGYNYVSWYQQHPGKAPKLMIYDVSKRPSGVSNRFSGSKSGNTASLTISGLQAEDEADYYCSSYTSSSLNHVFGTGTKVTVLTTTPAPRPPTPAPTIASQPLSLRPEACRPAAGGAVHTRGLDFACDIYIWAPLAGTCGVLLLSLVITLYCKRGRKKLLYIFKQPFMRPVQTTQEEDGCSCRFPEEEEGGCELRVKFSRSADAPAYKQGQNQLYNELNLGRREEYDVLDKRRGRDPEMGGKPRRKNPQEGLYNELQKDKMAEAYSEIGMKGERRRGKGHDGLYQGLSTATKDTYDALHMQALPPR

SEQ ID NO: 1899 - protein, 495 aa, Artificial Sequence
  source: /note="Description of Artificial Sequence: Synthetic Chimeric Antigen Receptor sequence"
MALPVTALLLPLALLLHAARPQVQLVQSGGGLIQPGGSLRLSCAASGFTVSSNYMSWVRQAPGKGLEWVSVIYSGGSTYYADSVKGRFTISRDNSKNTLYLQMNSLRAEDTAVYYCASQSTPYDSSGYYSGDAFDIWGQGTMVTVSSGGGGSGGGGSGGGGSSYVLTQPPSASGTPGQRVTISCSGSSSNIGSNYVYWYQQLPGTAPKLLIYRNNQRPSGVPDRFSGSKSGTSASLAISGLRSEDEADYYCAAWDDSLSGYVFGTGTKLTVLTTTPAPRPPTPAPTIASQPLSLRPEACRPAAGGAVHTRGLDFACDIYIWAPLAGTCGVLLLSLVITLYCKRGRKKLLYIFKQPFMRPVQTTQEEDGCSCRFPEEEEGGCELRVKFSRSADAPAYKQGQNQLYNELNLGRREEYDVLDKRRGRDPEMGGKPRRKNPQEGLYNELQKDKMAEAYSEIGMKGERRRGKGHDGLYQGLSTATKDTYDALHMQALPPR

SEQ ID NO: 1900 - protein, 496 aa, Artificial Sequence
  source: /note="Description of Artificial Sequence: Synthetic Chimeric Antigen Receptor sequence"
MALPVTALLLPLALLLHAARPEVQLVESGAEVKKPGESLKISCKGSGYSFTGSWIGWGRQMPGKGLEWMGIIYPGDSDTRYSPSFQGQVTISADKSISTAYLQWSSLKASDTAMYYCARGFLRGGDCCGALDIWGQGTMVTVSSGGGGSGGGGSGGGGSDIVMTQSPLSLPVTPGEPASISCRSSQSLLHSNGYNYLDWYLQKPGQSPQLLIYLGSNRASGVPDRFSGSGSGTDFTLKISRVEAEDVGVYYCMQALQTPPWTFGQGTKLEIKRTTTPAPRPPTPAPTIASQPLSLRPEACRPAAGGAVHTRGLDFACDIYIWAPLAGTCGVLLLSLVITLYCKRGRKKLLYIFKQPFMRPVQTTQEEDGCSCRFPEEEEGGCELRVKFSRSADAPAYKQGQNQLYNELNLGRREEYDVLDKRRGRDPEMGGKPRRKNPQEGLYNELQKDKMAEAYSEIGMKGERRRGKGHDGLYQGLSTATKDTYDALHMQALPPR

SEQ ID NO: 1901 - protein, 496 aa, Artificial Sequence
  source: /note="Description of Artificial Sequence: Synthetic Chimeric Antigen Receptor sequence"
MALPVTALLLPLALLLHAARPQVQLVQSGAEVKKPGASVKVSCKASGYTFTSYDINWVRQATGQGLEWMGWMNPNSGNTGYAQKFQGRVTMTRNTSISTAYMELSSLRSEDTAVYYCARGDSNYWSYYGMDVWGQGTLVTVSSGGGGSGGGGSGGGGSGGGGSQSVLTQPRSVSGSPGQSVTISCTGTSSDVGGYNYVSWYQQHPGEAPKLIIYDADKRPSGISNRFSSGKSGNTASLTISGLQVEDEADYYCCSYAGGSTWVFGGGTKVTVLTTTPAPRPPTPAPTIASQPLSLRPEACRPAAGGAVHTRGLDFACDIYIWAPLAGTCGVLLLSLVITLYCKRGRKKLLYIFKQPFMRPVQTTQEEDGCSCRFPEEEEGGCELRVKFSRSADAPAYKQGQNQLYNELNLGRREEYDVLDKRRGRDPEMGGKPRRKNPQEGLYNELQKDKMAEAYSEIGMKGERRRGKGHDGLYQGLSTATKDTYDALHMQALPPR

SEQ ID NO: 1902 - protein, 497 aa, Artificial Sequence
  source: /note="Description of Artificial Sequence: Synthetic Chimeric Antigen Receptor sequence"
MALPVTALLLPLALLLHAARPEVQLQQSGPGLVKPSQTLSLTCAISGDSVLSNSDTWNWIRQSPSRGLEWLGRTYHRSTWYDDYASSVRGRVSINVDTSKNQYSLQLNAVTPEDTGVYYCARDRLQDGNSWSDAFDVWGQGTMVTVSSGGGGSGGGGSGGGGSQSALTQPASASGSPGQSVTISCTGTSSDVGGYNYVSWYQQHPGKAPKLMIYDVSNRPSGVSNRFSGSKSGNTASLTISGLQAEDEADYYCSSYTSSSTLYVFGTGTQLTVLTTTPAPRPPTPAPTIASQPLSLRPEACRPAAGGAVHTRGLDFACDIYIWAPLAGTCGVLLLSLVITLYCKRGRKKLLYIFKQPFMRPVQTTQEEDGCSCRFPEEEEGGCELRVKFSRSADAPAYKQGQNQLYNELNLGRREEYDVLDKRRGRDPEMGGKPRRKNPQEGLYNELQKDKMAEAYSEIGMKGERRRGKGHDGLYQGLSTATKDTYDALHMQALPPR

SEQ ID NO: 1903 - protein, 498 aa, Artificial Sequence
  source: /note="Description of Artificial Sequence: Synthetic Chimeric Antigen Receptor sequence"
MALPVTALLLPLALLLHAARPEVQLQQSGPGLVKPSQTLSLTCAISGDSVLSNSDTWNWIRQSPSRGLEWLGRTYHRSTWYDDYASSVRGRVSINVDTSKNQYSLQLNAVTPEDTGVYYCARDRLQDGNSWSDAFDVWGQGTMVTVSSGGGGSGGGGSGGGGSQSALTQPASVSGSPGQSITISCTGTSSDVGGYNYVSWYQQHPGKAPKLMIYDVSNRPSGVSNRFSGSKSGNTASLTISGLQAEDEADYYCSSYTSSSTLVYVFGTGTKVTVLTTTPAPRPPTPAPTIASQPLSLRPEACRPAAGGAVHTRGLDFACDIYIWAPLAGTCGVLLLSLVITLYCKRGRKKLLYIFKQPFMRPVQTTQEEDGCSCRFPEEEEGGCELRVKFSRSADAPAYKQGQNQLYNELNLGRREEYDVLDKRRGRDPEMGGKPRRKNPQEGLYNELQKDKMAEAYSEIGMKGERRRGKGHDGLYQGLSTATKDTYDALHMQALPPR

SEQ ID NO: 1904 - protein, 498 aa, Artificial Sequence
  source: /note="Description of Artificial Sequence: Synthetic Chimeric Antigen Receptor sequence"
MALPVTALLLPLALLLHAARPEVQLQQSGPGLVKPSQTLSLTCAISGDSVSSNSAAWNWIRQSPSRGLEWLGRTYYRSKWYSDYAVSVKSRITINPDTSKNQFSLQLNSVTPEDTAVYYCARDPYDFWSGYPDAFDIWGQGTMVTVSSGGGGSGGGGSGGGGSQSALTQPASVSGSPGQSITISCTGTSSDVGGYNYVSWYQQHPGKAPKVIISEVNNRPSGVSHRFSGSKSGNTASLTISGLQAEDEADYFCSSYTSGRTLYVFGTGSKVTVLGTTTPAPRPPTPAPTIASQPLSLRPEACRPAAGGAVHTRGLDFACDIYIWAPLAGTCGVLLLSLVITLYCKRGRKKLLYIFKQPFMRPVQTTQEEDGCSCRFPEEEEGGCELRVKFSRSADAPAYKQGQNQLYNELNLGRREEYDVLDKRRGRDPEMGGKPRRKNPQEGLYNELQKDKMAEAYSEIGMKGERRRGKGHDGLYQGLSTATKDTYDALHMQALPPR

SEQ ID NO: 1905 - protein, 498 aa, Artificial Sequence
  source: /note="Description of Artificial Sequence: Synthetic Chimeric Antigen Receptor sequence"
MALPVTALLLPLALLLHAARPQVNLRESGPALVKPTQTLTLTCTFSGFSLNTFGMSVSWIRQPPGKALEWLALIDWDDDKYYSTSLRTRLTISKDTAKNQVVLRMTNMDPMDTATYYCARIYGGDRTNTQAPYFFDLWGQGTLVTVSSGGGGSGGGGSGGGGSDVVMTQSPLSLPVTPGEPASISCRSSQSLLHSNGYNYLDWYLQKPGQSPQLLIYLGSNRASGVPDRFSGSGSGTDFTLKISRVEAEDVGVYYCMQALQTPWTFGQGTKLEIKTTTPAPRPPTPAPTIASQPLSLRPEACRPAAGGAVHTRGLDFACDIYIWAPLAGTCGVLLLSLVITLYCKRGRKKLLYIFKQPFMRPVQTTQEEDGCSCRFPEEEEGGCELRVKFSRSADAPAYKQGQNQLYNELNLGRREEYDVLDKRRGRDPEMGGKPRRKNPQEGLYNELQKDKMAEAYSEIGMKGERRRGKGHDGLYQGLSTATKDTYDALHMQALPPR

SEQ ID NO: 1906 - protein, 498 aa, Artificial Sequence
  source: /note="Description of Artificial Sequence: Synthetic Chimeric Antigen Receptor sequence"
MALPVTALLLPLALLLHAARPQVQLVQSGAEVKKPGASVKVSCKASGYTFTSYGISWVRQAPGQGLEWMGWISAYNGNTNYAQKLQGRVTMTTDTSTSTAYMELRSLRSDDTAVYYCARAGLALYSNYVPYYYYGMDVWGQGTTVTVSSGGGGSGGGGSGGGGSNFMLTQPHSVSESPGKTVTISCTRSSGSIASNYVQWYQQRPGSSPTTVIYEDNQRPSGVPDRFSGSIDSSSNSASLTISGLKTEDEADYYCQSYDSSNPWVFGGGTKLTVLTTTPAPRPPTPAPTIASQPLSLRPEACRPAAGGAVHTRGLDFACDIYIWAPLAGTCGVLLLSLVITLYCKRGRKKLLYIFKQPFMRPVQTTQEEDGCSCRFPEEEEGGCELRVKFSRSADAPAYKQGQNQLYNELNLGRREEYDVLDKRRGRDPEMGGKPRRKNPQEGLYNELQKDKMAEAYSEIGMKGERRRGKGHDGLYQGLSTATKDTYDALHMQALPPR

SEQ ID NO: 1907 - protein, 525 aa, Artificial Sequence
  source: /note="Description of Artificial Sequence: Synthetic Chimeric Antigen Receptor sequence"
MALPVTALLLPLALLLHAARPDIQMTQSPSSLSASVGDRVTITCSASSSVSYMNWYQQTPGKAPKRWIYDTSKLASGVPSRFSGSGSGTDYTFTISSLQPEDIATYYCQQWSSNPFTFGQGTKLQIGGGGSGGGGSGGGGSQVQLVQSGGGVVQPGRSLRLSCKASGYTFTRYTMHWVRQAPGKGLEWIGYINPSRGYTNYNQKVKDRFTISRDNSKNTAFLQMDSLRPEDTGVYFCARYYDDHYCLDYWGQGTPVTVSSTTTPAPRPPTPAPTIASQPLSLRPEACRPAAGGAVHTRGLDFACDIYIWAPLAGTCGVLLLSLVITLYCRSKRSRLLHSDYMNMTPRRPGPTRKHYQPYAPPRDFAAYRSKRGRKKLLYIFKQPFMRPVQTTQEEDGCSCRFPEEEEGGCELRVKFSRSADAPAYQQGQNQLYNELNLGRREEYDVLDKRRGRDPEMGGKPQRRKNPQEGLYNELQKDKMAEAYSEIGMKGERRRGKGHDGLYQGLSTATKDTYDALHMQALPPR

SEQ ID NO: 1908 - protein, 711 aa, Artificial Sequence
  source: /note="Description of Artificial Sequence: Synthetic Chimeric Antigen Receptor sequence"
DIQMTQTTSSLSASLGDRVTISCRASQDISKYLNWYQQKPDGTVKLLIYHTSRLHSGVPSRFSGSGSGTDYSLTISNLEQEDIATYFCQQGNTLPYTFGGGTKLEITGGGGSQVQLQQSGPGLVKPSQTLSLTCAISGDSVSSNSAAWNWIRQSPSRGLEWLGRTYYRSKWYNDYAVSVKSRITINPDTSKNQFSLQLNSVTPEDTAVYYCAREVTGDLEDAFDIWGQGTMVTVSSGSTSGSGKPGSGEGSTKGDIQMTQSPSSLSASVGDRVTITCRASQTIWSYLNWYQQRPGKAPNLLIYAASSLQSGVPSRFSGRGSGTDFTLTISSLQAEDFATYYCQQSYSIPQTFGQGTKLEIKGGGGSEVKLQESGPGLVAPSQSLSVTCTVSGVSLPDYGVSWIRQPPRKGLEWLGVIWGSETTYYNSALKSRLTIIKDNSKSQVFLKMNSLQTDDTAIYYCAKHYYYGGSYAMDYWGQGTSVTVSSSGTTTPAPRPPTPAPTIASQPLSLRPEACRPAAGGAVHTRGLDFACDIYIWAPLAGTCGVLLLSLVITLYCKRGRKKLLYIFKQPFMRPVQTTQEEDGCSCRFPEEEEGGCELRVKFSRSADAPAYKQGQNQLYNELNLGRREEYDVLDKRRGRDPEMGGKPRRKNPQEGLYNELQKDKMAEAYSEIGMKGERRRGKGHDGLYQGLSTATKDTYDALHMQALPPR

SEQ ID NO: 1909 - protein, 792 aa, Artificial Sequence [sequence omitted]

SEQ ID NO: 1910 - protein, 727 aa, Artificial Sequence
  source: /note="Description of Artificial Sequence: Synthetic Chimeric Antigen Receptor sequence"
MVLLVTSLLLCELPHPAFLLIPDTEVQLVESGGGLVKPGGSLKLSCAASGFAFSIYDMSWVRQTPEKRLEWVAYISSGGGTYYPDTVKGRFTISRDNAKNTLYLQMSSLKSEDTAMYYCARHSGYGSSYGVLFAYWGQGTLVTVSAGGGGSGGGGSGGGGSDIQMTQTTSSLSASLGDRVTISCRASQDISNYLNWYQQKPDGTVKLLIYYTSILHSGVPSRFSGSGSGTDYSLTISNLEQEDFATYFCQQGNTLPWTFGGGTKLEIKAEPKSCDKTHTCPPCPAPELLGGPSVFLFPPKPKDTLMISRTPEVTCVVVDVSHEDPEVKFNWYVDGVEVHNAKTKPREEQYNSTYRVVSVLTVLHQDWLNGKEYKCKVSNKALPAPIEKTISKAKGQPREPQVYTLPPSRDELTKNQVSLTCLVKGFYPSDIAVEWESNGQPENNYKTTPPVLDSDGSFFLYSKLTVDKSRWQQGNVFSCSVMHEALHNHYTQKSLSLSPGKKDPKAAAIEVMYPPPYLDNEKSNGTIIHVKGKHLCPSPLFPGPSKPFWVLVVVGGVLACYSLLVTVAFIIFWVRSKRSRLLHSDYMNMTPRRPGPTRKHYQPYAPPRDFAAYRSRVKFSRSADAPAYQQGQNQLYNELNLGRREEYDVLDKRRGRDPEMGGKPRRKNPQEGLYNELQKDKMAEAYSEIGMKGERRRGKGHDGLYQGLSTATKDTYDALHMQALPPR

SEQ ID NO: 1911 - protein, 792 aa, Artificial Sequence
  source: /note="Description of Artificial Sequence: Synthetic Chimeric Antigen Receptor sequence"
MVLLVTSLLLCELPHPAFLLIPDTEVQLVESGGGLVKPGGSLKLSCAASGFAFSIYDMSWVRQTPEKRLEWVAYISSGGGTYYPDTVKGRFTISRDNAKNTLYLQMSSLKSEDTAMYYCARHSGYGTHWGVLFAYWGQGTLVTVSAGGGGSGGGGSGGGGSDIQMTQTTSSLSASLGDRVTISCRASQDISNYLNWYQQKPDGTVKLLIYYTSILHSGVPSRFSGSGSGTDYSLTISNLEQEDFATYFCQQGNTLPWTFGGGTKLEIKAEPKSCDKTHTCPPCPAPELLGGPSVFLFPPKPKDTLMISRTPEVTCVVVDVSHEDPEVKFNWYVDGVEVHNAKTKPREEQYNSTYRVVSVLTVLHQDWLNGKEYKCKVSNKALPAPIEKTISKAKGQPREPQVYTLPPSRDELTKNQVSLTCLVKGFYPSDIAVEWESNGQPENNYKTTPPVLDSDGSFFLYSKLTVDKSRWQQGNVFSCSVMHEALHNHYTQKSLSLSPGKKDPKAAAAFVPVFLPAKPTTTPAPRPPTPAPTIASQPLSLRPEACRPAAGGAVHTRGLDFACDIYIWAPLAGTCGVLLLSLVITLYCNHRNRSKRSRLLHSDYMNMTPRRPGPTRKHYQPYAPPRDFAAYRSRFSVVKRGRKKLLYIFKQPFMRPVQTTQEEDGCSCRFPEEEEGGCELRVKFSRSADAPAYQQGQNQLYNELNLGRREEYDVLDKRRGRDPEMGGKPRRKNPQEGLYNELQKDKMAEAYSEIGMKGERRRGKGHDGLYQGLSTATKDTYDALHMQALPPR

SEQ ID NO: 1912 - protein, 511 aa, Artificial Sequence
  source: /note="Description of Artificial Sequence: Synthetic Chimeric Antigen Receptor sequence"
MVLLVTSLLLCELPHPAFLLIPDTEVQLVESGGGLVKPGGSLKLSCAASGFAFSIYDMSWVRQTPEKRLEWVAYISSGGGTYYPDTVKGRFTISRDNAKNTLYLQMSSLKSEDTAMYYCARHSGYGTHWGVLFAYWGQGTLVTVSAGGGGSGGGGSGGGGSDIQMTQTTSSLSASLGDRVTISCRASQDISNYLNWYQQKPDGTVKLLIYYTSILHSGVPSRFSGSGSGTDYSLTISNLEQEDFATYFCQQGNTLPWTFGGGTKLEIKAKTTPPSVYGRVKDPKAAAATTTPAPRPPTPAPTIASQPLSLRPEACRPAAGGAVHTRGLDFACDIYIWAPLAGTCGVLLLSLVITLYCKRGRKKLLYIFKQPFMRPVQTTQEEDGCSCRFPEEEEGGCELRVKFSRSADAPAYKQGQNQLYNELNLGRREEYDVLDKRRGRDPEMGGKPRRKNPQEGLYNELQKDKMAEAYSEIGMKGERRRGKGHDGLYQGLSTATKDTYDALHMQALPPR

SEQ ID NO: 1913 - protein, 571 aa, Artificial Sequence
  source: /note="Description of Artificial Sequence: Synthetic Chimeric Antigen Receptor sequence"
MVLLVTSLLLCELPHPAFLLIPDTEVQLVESGGGLVKPGGSLKLSCAASGFAFSIYDMSWVRQTPEKRLEWVAYISSGGGTYYPDTVKGRFTISRDNAKNTLYLQMSSLKSEDTAMYYCARHSGYGTHWGVLFAYWGQGTLVTVSAGGGGSGGGGSGGGGSDIQMTQTTSSLSASLGDRVTISCRASQDISNYLNWYQQKPDGTVKLLIYYTSILHSGVPSRFSGSGSGTDYSLTISNLEQEDFATYFCQQGNTLPWTFGGGTKLEIKAKTTPPSVYGRVKDPKAAAAFVPVFLPAKPTTTPAPRPPTPAPTIASQPLSLRPEACRPAAGGAVHTRGLDFACDIYIWAPLAGTCGVLLLSLVITLYCNHRNRSKRSRLLHSDYMNMTPRRPGPTRKHYQPYAPPRDFAAYRSRFSVVKRGRKKLLYIFKQPFMRPVQTTQEEDGCSCRFPEEEEGGCELRVKFSRSADAPAYQQGQNQLYNELNLGRREEYDVLDKRRGRDPEMGGKPRRKNPQEGLYNELQKDKMAEAYSEIGMKGERRRGKGHDGLYQGLSTATKDTYDALHMQALPPR

SEQ ID NO: 1914 - protein, 506 aa, Artificial Sequence
  source: /note="Description of Artificial Sequence: Synthetic Chimeric Antigen Receptor sequence"
MVLLVTSLLLCELPHPAFLLIPDTEVQLVESGGGLVKPGGSLKLSCAASGFAFSIYDMSWVRQTPEKRLEWVAYISSGGGTYYPDTVKGRFTISRDNAKNTLYLQMSSLKSEDTAMYYCARHSGYGTHWGVLFAYWGQGTLVTVSAGGGGSGGGGSGGGGSDIQMTQTTSSLSASLGDRVTISCRASQDISNYLNWYQQKPDGTVKLLIYYTSILHSGVPSRFSGSGSGTDYSLTISNLEQEDFATYFCQQGNTLPWTFGGGTKLEIKAKTTPPSVYGRVKDPKAAAIEVMYPPPYLDNEKSNGTIIHVKGKHLCPSPLFPGPSKPFWVLVVVGGVLACYSLLVTVAFIIFWVRSKRSRLLHSDYMNMTPRRPGPTRKHYQPYAPPRDFAAYRSRVKFSRSADAPAYQQGQNQLYNELNLGRREEYDVLDKRRGRDPEMGGKPRRKNPQEGLYNELQKDKMAEAYSEIGMKGERRRGKGHDGLYQGLSTATKDTYDALHMQALPPR

SEQ ID NO: 1915 - protein, 480 aa, Artificial Sequence
  source: /note="Description of Artificial Sequence: Synthetic Chimeric Antigen Receptor sequence"
MLLLVTSLLLCELPHPAFLLIPQVQLQQSGPGLVKPSQTLSLTCAISGDSVSSNSAAWNWIRQSPSRGLEWLGRTYYRSKWYNDYAVSVKSRITINPDTSKNQFSLQLNSVTPEDTAVYYCAREVTGDLEDAFDIWGQGTMVTVSSGGGGSDIQMTQSPSSLSASVGDRVTITCRASQTIWSYLNWYQQRPGKAPNLLIYAASSLQSGVPSRFSGRGSGTDFTLTISSLQAEDFATYYCQQSYSIPQTFGQGTKLEIKAAAIEVMYPPPYLDNEKSNGTIIHVKGKHLCPSPLFPGPSKPFWVLVVVGGVLACYSLLVTVAFIIFWVRSKRSRLLHSDYMNMTPRRPGPTRKHYQPYAPPRDFAAYRSRVKFSRSADAPAYQQGQNQLYNELNLGRREEYDVLDKRRGRDPEMGGKPRRKNPQEGLYNELQKDKMAEAYSEIGMKGERRRGKGHDGLYQGLSTATKDTYDALHMQALPPR

SEQ ID NO: 1916 - protein, 484 aa, Artificial Sequence
  source: /note="Description of Artificial Sequence: Synthetic Chimeric Antigen Receptor sequence"
MLLLVTSLLLCELPHPAFLLIPQVQLQQSGPGLVKPSQTLSLTCAISGDSVSSNSAAWNWIRQSPSRGLEWLGRTYYRSKWYNDYAVSVKSRITINPDTSKNQFSLQLNSVTPEDTAVYYCAREVTGDLEDAFDIWGQGTMVTVSSGGGGSDIQMTQSPSSLSASVGDRVTITCRASQTIWSYLNWYQQRPGKAPNLLIYAASSLQSGVPSRFSGRGSGTDFTLTISSLQAEDFATYYCQQSYSIPQTFGQGTKLEIKAAATTTPAPRPPTPAPTIASQPLSLRPEACRPAAGGAVHTRGLDFACDIYIWAPLAGTCGVLLLSLVITLYCKRGRKKLLYIFKQPFMRPVQTTQEEDGCSCRFPEEEEGGCELRVKFSRSADAPAYKQGQNQLYNELNLGRREEYDVLDKRRGRDPEMGGKPRRKNPQEGLYNELQKDKMAEAYSEIGMKGERRRGKGHDGLYQGLSTATKDTYDALHMQALPPR

SEQ ID NO: 1917 - protein, 544 aa, Artificial Sequence
  source: /note="Description of Artificial Sequence: Synthetic Chimeric Antigen Receptor sequence"
MLLLVTSLLLCELPHPAFLLIPQVQLQQSGPGLVKPSQTLSLTCAISGDSVSSNSAAWNWIRQSPSRGLEWLGRTYYRSKWYNDYAVSVKSRITINPDTSKNQFSLQLNSVTPEDTAVYYCAREVTGDLEDAFDIWGQGTMVTVSSGGGGSDIQMTQSPSSLSASVGDRVTITCRASQTIWSYLNWYQQRPGKAPNLLIYAASSLQSGVPSRFSGRGSGTDFTLTISSLQAEDFATYYCQQSYSIPQTFGQGTKLEIKAAAFVPVFLPAKPTTTPAPRPPTPAPTIASQPLSLRPEACRPAAGGAVHTRGLDFACDIYIWAPLAGTCGVLLLSLVITLYCNHRNRSKRSRLLHSDYMNMTPRRPGPTRKHYQPYAPPRDFAAYRSRFSVVKRGRKKLLYIFKQPFMRPVQTTQEEDGCSCRFPEEEEGGCELRVKFSRSADAPAYQQGQNQLYNELNLGRREEYDVLDKRRGRDPEMGGKPRRKNPQEGLYNELQKDKMAEAYSEIGMKGERRRGKGHDGLYQGLSTATKDTYDALHMQALPPR

SEQ ID NO: 1918 - protein, 729 aa, Artificial Sequence
  source: /note="Description of Artificial Sequence: Synthetic Chimeric Antigen Receptor sequence"
QVQLQQSGPGLVKPSQTLSLTCAISGDSVSSNSAAWNWIRQSPSRGLEWLGRTYYRSKWYNDYAVSVKSRITINPDTSKNQFSLQLNSVTPEDTAVYYCAREVTGDLEDAFDIWGQGTMVTVSSGGGGSDIQMTQSPSSLSASVGDRVTITCRASQTIWSYLNWYQQRPGKAPNLLIYAASSLQSGVPSRFSGRGSGTDFTLTISSLQAEDFATYYCQQSYSIPQTFGQGTKLEIKGGGGSGGGGSGGGGSGGGGSGGGGSDIQMTQTTSSLSASLGDRVTISCRASQDISKYLNWYQQKPDGTVKLLIYHTSRLHSGVPSRFSGSGSGTDYSLTISNLEQEDIATYFCQQGNTLPYTFGGGTKLEITGSTSGSGKPGSGEGSTKGEVKLQESGPGLVAPSQSLSVTCTVSGVSLPDYGVSWIRQPPRKGLEWLGVIWGSETTYYNSALKSRLTIIKDNSKSQVFLKMNSLQTDDTAIYYCAKHYYYGGSYAMDYWGQGTSVTVSSTTTPAPRPPTPAPTIASQPLSLRPEACRPAAGGAVHTRGLDFACDIYIWAPLAGTCGVLLLSLVITLYCKRGRKKLLYIFKQPFMRPVQTTQEEDGCSCRFPEEEEGGCELRVKFSRSADAPAYKQGQNQLYNELNLGRREEYDVLDKRRGRDPEMGGKPRRKNPQEGLYNELQKDKMAEAYSEIGMKGERRRGKGHDGLYQGLSTATKDTYDALHMQALPPR

SEQ ID NO: 1919 - protein, 737 aa, Artificial Sequence
  source: /note="Description of Artificial Sequence: Synthetic Chimeric Antigen Receptor sequence"
EVQLQQSGPGLVKPSQTLSLTCAISGDSVSSNSAAWNWIRQSPSRGLEWLGRTYYRSKWYNDYAVSVKSRITINPDTSKNQFSLQLNSVTPEDTAVYYCARDLGWIAVAGTFDYWGQGTLVTVSSGGGGSGGGGSGGGGSQSALTQPASVSGSPGQSITISCTGTSSDVGGYNYVSWYQQHPGKAPKLMIYDVSKRPSGVSNRFSGSKSGNTASLTISGLQAEDEADYYCSSYTSSSLNHVFGTGTKVTVLTGGGGSGGGGSGGGGSGGGGSEIVMTQSPATLSLSPGERATLSCRASQDISKYLNWYQQKPGQAPRLLIYHTSRLHSGIPARFSGSGSGTDYTLTISSLQPEDFAVYFCQQGNTLPYTFGQGTKLEIKGGGGSGGGGSGGGGSQVQLQESGPGLVKPSETLSLTCTVSGVSLPDYGVSWIRQPPGKGLEWIGVIWGSETTYYQSSLKSRVTISKDNSKNQVSLKLSSVTAADTAVYYCAKHYYYGGSYAMDYWGQGTLVTVSSTTTPAPRPPTPAPTIASQPLSLRPEACRPAAGGAVHTRGLDFACDIYIWAPLAGTCGVLLLSLVITLYCKRGRKKLLYIFKQPFMRPVQTTQEEDGCSCRFPEEEEGGCELRVKFSRSADAPAYKQGQNQLYNELNLGRREEYDVLDKRRGRDPEMGGKPRRKNPQEGLYNELQKDKMAEAYSEIGMKGERRRGKGHDGLYQGLSTATKDTYDALHMQALPPR

SEQ ID NO: 1920 - protein, 703 aa, Artificial Sequence
  source: /note="Description of Artificial Sequence: Synthetic Chimeric Antigen Receptor sequence"
QVQLQQSGAEVKKPGSSVKVSCKASGGTFSSYAISWVRQAPGQGLEWMGGIIPILGIANYAQKFQGRVTITADESTSTAYMELSSLRSEDTAVYYCATGGSGRYALDIWGQGTMVTVSSGGGGSGGGGSGGGGSEIVLTQSPATLSLSPGERATLSCRASQSVSSYLAWYQQKPGQAPRLLIYDASNRATGIPARFSGSGSGTDFTLTISSLEPEDFAVYYCQQRSNWPPSYTFGQGTKLEIKRAEPKSCDKTHTCPPCPAPELLGGPSVFLFPPKPKDTLMISRTPEVTCVVVDVSHEDPEVKFNWYVDGVEVHNAKTKPREEQYNSTYRVVSVLTVLHQDWLNGKEYKCKVSNKALPAPIEKTISKAKGQPREPQVYTLPPSRDELTKNQVSLTCLVKGFYPSDIAVEWESNGQPENNYKTTPPVLDSDGSFFLYSKLTVDKSRWQQGNVFSCSVMHEALHNHYTQKSLSLSPGKKDPKAAAIEVMYPPPYLDNEKSNGTIIHVKGKHLCPSPLFPGPSKPFWVLVVVGGVLACYSLLVTVAFIIFWVRSKRSRLLHSDYMNMTPRRPGPTRKHYQPYAPPRDFAAYRSRVKFSRSADAPAYQQGQNQLYNELNLGRREEYDVLDKRRGRDPEMGGKPRRKNPQEGLYNELQKDKMAEAYSEIGMKGERRRGKGHDGLYQGLSTATKDTYDALHMQALPPR

SEQ ID NO: 1921 - protein, 223 aa, Artificial Sequence
  source: /note="Description of Artificial Sequence: Synthetic Chimeric Antigen Receptor sequence"
TTTPAPRPPTPAPTIASQPLSLRPEACRPAAGGAVHTRGLDFACDIYIWAPLAGTCGVLLLSLVITLYCKRGRKKLLYIFKQPFMRPVQTTQEEDGCSCRFPEEEEGGCELRVKFSRSADAPAYKQGQNQLYNELNLGRREEYDVLDKRRGRDPEMGGKPRRKNPQEGLYNELQKDKMAEAYSEIGMKGERRRGKGHDGLYQGLSTATKDTYDALHMQALPPR

SEQ ID NO: 1922 - protein, 470 aa, Artificial Sequence
  source: /note="Description of Artificial Sequence: Synthetic Chimeric Antigen Receptor sequence"
QVQLQQSGAEVKKPGSSVKVSCKASGGTFSSYAISWVRQAPGQGLEWMGGIIPILGIANYAQKFQGRVTITADESTSTAYMELSSLRSEDTAVYYCARGGAGGSGSYYPLIWGQGTTVTVSSGGGGSGGGGSGGGGSEIVLTQSPATLSLSPGERATLSCGASQSVSSSYLAWYQQKPGQAPRLLIYDASSRATGIPARFSGSGSGTDFTLTISSLEPEDFAVYYCQQRSSWPPTWTFGQGTKLEIKRAAAIEVMYPPPYLDNEKSNGTIIHVKGKHLCPSPLFPGPSKPFWVLVVVGGVLACYSLLVTVAFIIFWVRSKRSRLLHSDYMNMTPRRPGPTRKHYQPYAPPRDFAAYRSRVKFSRSADAPAYQQGQNQLYNELNLGRREEYDVLDKRRGRDPEMGGKPRRKNPQEGLYNELQKDKMAEAYSEIGMKGERRRGKGHDGLYQGLSTATKDTYDALHMQALPPR

SEQ ID NO: 1923 - protein, 705 aa, Artificial Sequence
  source: /note="Description of Artificial Sequence: Synthetic Chimeric Antigen Receptor sequence"
QVQLVQSGAEVKKPGSSVKVSCKASGGTFSSYAISWVRQAPGQGLEWMGGIIPILGTANYAQKFQGRVTITADESTSTAYMELSSLRSEDTAVYYCARWGGGAFDIWGQGTMVTVSSGGGGSGGGGSGGGGSEIVLTQSPGTLSLSPGERATLSCRASQSVGGYLAWYQQKPGQAPRLLIYDASNRATGIPARFSGSGSGTDFTLTISSLEPEDFAVYYCQQRNNWPPMYTFGQGTKLEIKRAEPKSCDKTHTCPPCPAPELLGGPSVFLFPPKPKDTLMISRTPEVTCVVVDVSHEDPEVKFNWYVDGVEVHNAKTKPREEQYNSTYRVVSVLTVLHQDWLNGKEYKCKVSNKALPAPIEKTISKAKGQPREPQVYTLPPSRDELTKNQVSLTCLVKGFYPSDIAVEWESNGQPENNYKTTPPVLDSDGSFFLYSKLTVDKSRWQQGNVFSCSVMHEALHNHYTQKSLSLSPGKKDPKAAATTTPAPRPPTPAPTIASQPLSLRPEACRPAAGGAVHTRGLDFACDIYIWAPLAGTCGVLLLSLVITLYCKRGRKKLLYIFKQPFMRPVQTTQEEDGCSCRFPEEEEGGCELRVKFSRSADAPAYKQGQNQLYNELNLGRREEYDVLDKRRGRDPEMGGKPRRKNPQEGLYNELQKDKMAEAYSEIGMKGERRRGKGHDGLYQGLSTATKDTYDALHMQALPPR

SEQ ID NO: 1924 - protein, 707 aa, Artificial Sequence
  source: /note="Description of Artificial Sequence: Synthetic Chimeric Antigen Receptor sequence"
QVQLQQSGAEVKKPGSSVKVSCKASGGTFSSYAISWVRQAPGQGLEWMGGIIPILGIANYAQKFQGRVTITADESTSTAYMELSSLRSEDTAVYYCATGGSGRYALDIWGQGTMVTVSSGGGGSGGGGSGGGGSEIVLTQSPATLSLSPGERATLSCRASQSVSSYLAWYQQKPGQAPRLLIYDASNRATGIPARFSGSGSGTDFTLTISSLEPEDFAVYYCQQRSNWPPSYTFGQGTKLEIKRAEPKSCDKTHTCPPCPAPELLGGPSVFLFPPKPKDTLMISRTPEVTCVVVDVSHEDPEVKFNWYVDGVEVHNAKTKPREEQYNSTYRVVSVLTVLHQDWLNGKEYKCKVSNKALPAPIEKTISKAKGQPREPQVYTLPPSRDELTKNQVSLTCLVKGFYPSDIAVEWESNGQPENNYKTTPPVLDSDGSFFLYSKLTVDKSRWQQGNVFSCSVMHEALHNHYTQKSLSLSPGKKDPKAAATTTPAPRPPTPAPTIASQPLSLRPEACRPAAGGAVHTRGLDFACDIYIWAPLAGTCGVLLLSLVITLYCKRGRKKLLYIFKQPFMRPVQTTQEEDGCSCRFPEEEEGGCELRVKFSRSADAPAYKQGQNQLYNELNLGRREEYDVLDKRRGRDPEMGGKPRRKNPQEGLYNELQKDKMAEAYSEIGMKGERRRGKGHDGLYQGLSTATKDTYDALHMQALPPR

SEQ ID NO: 1925 - protein, 711 aa, Artificial Sequence
  source: /note="Description of Artificial Sequence: Synthetic Chimeric Antigen Receptor sequence"
QVQLQQSGAEVKKPGSSVKVSCKASGGTFSSYAISWVRQAPGQGLEWMGGIIPILGIANYAQKFQGRVTITADESTSTAYMELSSLRSEDTAVYYCARGGAGGSGSYYPLIWGQGTTVTVSSGGGGSGGGGSGGGGSEIVLTQSPATLSLSPGERATLSCGASQSVSSSYLAWYQQKPGQAPRLLIYDASSRATGIPARFSGSGSGTDFTLTISSLEPEDFAVYYCQQRSSWPPTWTFGQGTKLEIKRAEPKSCDKTHTCPPCPAPELLGGPSVFLFPPKPKDTLMISRTPEVTCVVVDVSHEDPEVKFNWYVDGVEVHNAKTKPREEQYNSTYRVVSVLTVLHQDWLNGKEYKCKVSNKALPAPIEKTISKAKGQPREPQVYTLPPSRDELTKNQVSLTCLVKGFYPSDIAVEWESNGQPENNYKTTPPVLDSDGSFFLYSKLTVDKSRWQQGNVFSCSVMHEALHNHYTQKSLSLSPGKKDPKAAATTTPAPRPPTPAPTIASQPLSLRPEACRPAAGGAVHTRGLDFACDIYIWAPLAGTCGVLLLSLVITLYCKRGRKKLLYIFKQPFMRPVQTTQEEDGCSCRFPEEEEGGCELRVKFSRSADAPAYKQGQNQLYNELNLGRREEYDVLDKRRGRDPEMGGKPRRKNPQEGLYNELQKDKMAEAYSEIGMKGERRRGKGHDGLYQGLSTATKDTYDALHMQALPPR

SEQ ID NO: 1926 - protein, 765 aa, Artificial Sequence
  source: /note="Description of Artificial Sequence: Synthetic Chimeric Antigen Receptor sequence"
QVQLVQSGAEVKKPGSSVKVSCKASGGTFSSYAISWVRQAPGQGLEWMGGIIPILGTANYAQKFQGRVTITADESTSTAYMELSSLRSEDTAVYYCARWGGGAFDIWGQGTMVTVSSGGGGSGGGGSGGGGSEIVLTQSPGTLSLSPGERATLSCRASQSVGGYLAWYQQKPGQAPRLLIYDASNRATGIPARFSGSGSGTDFTLTISSLEPEDFAVYYCQQRNNWPPMYTFGQGTKLEIKRAEPKSCDKTHTCPPCPAPELLGGPSVFLFPPKPKDTLMISRTPEVTCVVVDVSHEDPEVKFNWYVDGVEVHNAKTKPREEQYNSTYRVVSVLTVLHQDWLNGKEYKCKVSNKALPAPIEKTISKAKGQPREPQVYTLPPSRDELTKNQVSLTCLVKGFYPSDIAVEWESNGQPENNYKTTPPVLDSDGSFFLYSKLTVDKSRWQQGNVFSCSVMHEALHNHYTQKSLSLSPGKKDPKAAAFVPVFLPAKPTTTPAPRPPTPAPTIASQPLSLRPEACRPAAGGAVHTRGLDFACDIYIWAPLAGTCGVLLLSLVITLYCNHRNRSKRSRLLHSDYMNMTPRRPGPTRKHYQPYAPPRDFAAYRSRFSVVKRGRKKLLYIFKQPFMRPVQTTQEEDGCSCRFPEEEEGGCELRVKFSRSADAPAYQQGQNQLYNELNLGRREEYDVLDKRRGRDPEMGGKPRRKNPQEGLYNELQKDKMAEAYSEIGMKGERRRGKGHDGLYQGLSTATKDTYDALHMQALPPR

SEQ ID NO: 1927 - protein, 767 aa, Artificial Sequence
  source: /note="Description of Artificial Sequence: Synthetic Chimeric Antigen Receptor sequence"
QVQLQQSGAEVKKPGSSVKVSCKASGGTFSSYAISWVRQAPGQGLEWMGGIIPILGIANYAQKFQGRVTITADESTSTAYMELSSLRSEDTAVYYCATGGSGRYALDIWGQGTMVTVSSGGGGSGGGGSGGGGSEIVLTQSPATLSLSPGERATLSCRASQSVSSYLAWYQQKPGQAPRLLIYDASNRATGIPARFSGSGSGTDFTLTISSLEPEDFAVYYCQQRSNWPPSYTFGQGTKLEIKRAEPKSCDKTHTCPPCPAPELLGGPSVFLFPPKPKDTLMISRTPEVTCVVVDVSHEDPEVKFNWYVDGVEVHNAKTKPREEQYNSTYRVVSVLTVLHQDWLNGKEYKCKVSNKALPAPIEKTISKAKGQPREPQVYTLPPSRDELTKNQVSLTCLVKGFYPSDIAVEWESNGQPENNYKTTPPVLDSDGSFFLYSKLTVDKSRWQQGNVFSCSVMHEALHNHYTQKSLSLSPGKKDPKAAAFVPVFLPAKPTTTPAPRPPTPAPTIASQPLSLRPEACRPAAGGAVHTRGLDFACDIYIWAPLAGTCGVLLLSLVITLYCNHRNRSKRSRLLHSDYMNMTPRRPGPTRKHYQPYAPPRDFAAYRSRFSVVKRGRKKLLYIFKQPFMRPVQTTQEEDGCSCRFPEEEEGGCELRVKFSRSADAPAYQQGQNQLYNELNLGRREEYDVLDKRRGRDPEMGGKPRRKNPQEGLYNELQKDKMAEAYSEIGMKGERRRGKGHDGLYQGLSTATKDTYDALHMQALPPR

SEQ ID NO: 1928 - protein, 771 aa, Artificial Sequence
  source: /note="Description of Artificial Sequence: Synthetic Chimeric Antigen Receptor sequence"
QVQLQQSGAEVKKPGSSVKVSCKASGGTFSSYAISWVRQAPGQGLEWMGGIIPILGIANYAQKFQGRVTITADESTSTAYMELSSLRSEDTAVYYCARGGAGGSGSYYPLIWGQGTTVTVSSGGGGSGGGGSGGGGSEIVLTQSPATLSLSPGERATLSCGASQSVSSSYLAWYQQKPGQAPRLLIYDASSRATGIPARFSGSGSGTDFTLTISSLEPEDFAVYYCQQRSSWPPTWTFGQGTKLEIKRAEPKSCDKTHTCPPCPAPELLGGPSVFLFPPKPKDTLMISRTPEVTCVVVDVSHEDPEVKFNWYVDGVEVHNAKTKPREEQYNSTYRVVSVLTVLHQDWLNGKEYKCKVSNKALPAPIEKTISKAKGQPREPQVYTLPPSRDELTKNQVSLTCLVKGFYPSDIAVEWESNGQPENNYKTTPPVLDSDGSFFLYSKLTVDKSRWQQGNVFSCSVMHEALHNHYTQKSLSLSPGKKDPKAAAFVPVFLPAKPTTTPAPRPPTPAPTIASQPLSLRPEACRPAAGGAVHTRGLDFACDIYIWAPLAGTCGVLLLSLVITLYCNHRNRSKRSRLLHSDYMNMTPRRPGPTRKHYQPYAPPRDFAAYRSRFSVVKRGRKKLLYIFKQPFMRPVQTTQEEDGCSCRFPEEEEGGCELRVKFSRSADAPAYQQGQNQLYNELNLGRREEYDVLDKRRGRDPEMGGKPRRKNPQEGLYNELQKDKMAEAYSEIGMKGERRRGKGHDGLYQGLSTATKDTYDALHMQALPPR

SEQ ID NO: 1929 - protein, 906 aa, Artificial Sequence
  source: /note="Description of Artificial Sequence: Synthetic Chimeric Antigen Receptor sequence"
QVQLQQWGAGLLKPSETLSLTCAVYGGSFSAYYWSWIRQPPGKGLEWIGDINHGGGTNYNPSLKSRVTISVDTSKNQFSLKLNSVTAADTAVYYCASLTAYWGQGSLVTVSSGSTSGSGKPGSSEGSTKGDIQMTQSPTSLSASVGDRVTITCRASQGISSWLTWYQQKPEKAPKSLIYAASSLQSGVPSRFSGSGSGTDFTLTISSLQPEDFATYYCQQYDSYPITFGQGTRLEIKGSTSGSGKPGSSEGSTKGFWVLVVVGGVLACYSLLVTVAFIIFWVKRGRKKLLYIFKQPFMRPVQTTQEEDGCSCRFPEEEEGGCELQRRKYRSNKGESPVEPAEPCHYSCPREEEGSTIPIQEDYRKPEPACSPGSTSGSGKPGSSEGSTKGRVKFSRSADAPAYKQGQNQLYNELNLGRREEYDVLDKRRGRDPEMGGKPRRKNPQEGLYNELQKDKMAEAYSEIGMKGERRRGKGHDGLYQGLSTATKDTYDALHMQALPPRGSTSGSGKPGSSEGSTKGVGALESLRGNADLAYILSMEPCGHCLIINNVNFCRESGLRTRTGSNIDCEKLRRRFSSLHFMVEVKGDLTAKKMVLALLELAQQDHGALDCCVVVILSHGCQASHLQFPGAVYGTDGCPVSVEKIVNIFNGTSCPSLGGKPKLFFIQACGGEQKDHGFEVASTSPEDESPGSNPEPDATPFQEGLRTFDQLDAISSLPTPSDIFVSYSTFPGFVSWRDPKSGSWYVETLDDIFEQWAHSEDLQSLLLRVANAVSVKGIYKQMPGCFNFLRKKLFFKTSMGVQVETISPGDGRTFPKRGQTCVVHYTGMLEDGKKVDSSRDRNKPFKFMLGKQEVIRGWEEGVAQMSVGQRAKLTISPDYAYGATGHPGIIPPHATLVFDVELLKLE

SEQ ID NO: 1930 - protein, 470 aa, Artificial Sequence; identical to SEQ ID NO: 1922
  source: /note="Description of Artificial Sequence: Synthetic Chimeric Antigen Receptor sequence"

SEQ ID NO: 1931 - protein, 474 aa, Artificial Sequence
  source: /note="Description of Artificial Sequence: Synthetic Chimeric Antigen Receptor sequence"
QVQLQQSGAEVKKPGSSVKVSCKASGGTFSSYAISWVRQAPGQGLEWMGGIIPILGIANYAQKFQGRVTITADESTSTAYMELSSLRSEDTAVYYCARGGAGGSGSYYPLIWGQGTTVTVSSGGGGSGGGGSGGGGSEIVLTQSPATLSLSPGERATLSCGASQSVSSSYLAWYQQKPGQAPRLLIYDASSRATGIPARFSGSGSGTDFTLTISSLEPEDFAVYYCQQRSSWPPTWTFGQGTKLEIKRAAATTTPAPRPPTPAPTIASQPLSLRPEACRPAAGGAVHTRGLDFACDIYIWAPLAGTCGVLLLSLVITLYCKRGRKKLLYIFKQPFMRPVQTTQEEDGCSCRFPEEEEGGCELRVKFSRSADAPAYKQGQNQLYNELNLGRREEYDVLDKRRGRDPEMGGKPRRKNPQEGLYNELQKDKMAEAYSEIGMKGERRRGKGHDGLYQGLSTATKDTYDALHMQALPPR

SEQ ID NO: 1932 - protein, 534 aa, Artificial Sequence
  source: /note="Description of Artificial Sequence: Synthetic Chimeric Antigen Receptor sequence"
QVQLQQSGAEVKKPGSSVKVSCKASGGTFSSYAISWVRQAPGQGLEWMGGIIPILGIANYAQKFQGRVTITADESTSTAYMELSSLRSEDTAVYYCARGGAGGSGSYYPLIWGQGTTVTVSSGGGGSGGGGSGGGGSEIVLTQSPATLSLSPGERATLSCGASQSVSSSYLAWYQQKPGQAPRLLIYDASSRATGIPARFSGSGSGTDFTLTISSLEPEDFAVYYCQQRSSWPPTWTFGQGTKLEIKRAAAFVPVFLPAKPTTTPAPRPPTPAPTIASQPLSLRPEACRPAAGGAVHTRGLDFACDIYIWAPLAGTCGVLLLSLVITLYCNHRNRSKRSRLLHSDYMNMTPRRPGPTRKHYQPYAPPRDFAAYRSRFSVVKRGRKKLLYIFKQPFMRPVQTTQEEDGCSCRFPEEEEGGCELRVKFSRSADAPAYQQGQNQLYNELNLGRREEYDVLDKRRGRDPEMGGKPRRKNPQEGLYNELQKDKMAEAYSEIGMKGERRRGKGHDGLYQGLSTATKDTYDALHMQALPPR

SEQ ID NO: 1933 - protein, 714 aa, Artificial Sequence
  source: /note="Description of Artificial Sequence: Synthetic Chimeric Antigen Receptor sequence"
QVQLQQSGAEVKKPGSSVKVSCKASGGTFSSYAISWVRQAPGQGLEWMGGIIPILGIANYAQKFQGRVTITADESTSTAYMELSSLRSEDTAVYYCARGGAGGSGSYYPLIWGQGTTVTVSSGGGGSGGGGSGGGGSEIVLTQSPATLSLSPGERATLSCGASQSVSSSYLAWYQQKPGQAPRLLIYDASSRATGIPARFSGSGSGTDFTLTISSLEPEDFAVYYCQQRSSWPPTWTFGQGTKLEIKRAEPKSCDKTHTCPPCPAPELLGGPSVFLFPPKPKDTLMISRTPEVTCVVVDVSHEDPEVKFNWYVDGVEVHNAKTKPREEQYNSTYRVVSVLTVLHQDWLNGKEYKCKVSNKALPAPIEKTISKAKGQPREPQVYTLPPSRDELTKNQVSLTCLVKGFYPSDIAVEWESNGQPENNYKTTPPVLDSDGSFFLYSKLTVDKSRWQQGNVFSCSVMHEALHNHYTQKSLSLSPGKKDPKAAAIEGAAAAIEVMYPPPYLDNEKSNGTIIHVKGKHLCPSPLFPGPSKPFWVLVVVGGVLACYSLLVTVAFIIFWVRSKRSRLLHSDYMNMTPRRPGPTRKHYQPYAPPRDFAAYRSRVKFSRSADAPAYQQGQNQLYNELNLGRREEYDVLDKRRGRDPEMGGKPRRKNPQEGLYNELQKDKMAEAYSEIGMKGERRRGKGHDGLYQGLSTATKDTYDALHMQALPPR

SEQ ID NO: 1934 - protein, 464 aa, Artificial Sequence
  source: /note="Description of Artificial Sequence: Synthetic Chimeric Antigen Receptor sequence"
QVQLVQSGAEVKKPGSSVKVSCKASGGTFSSYAISWVRQAPGQGLEWMGGIIPILGTANYAQKFQGRVTITADESTSTAYMELSSLRSEDTAVYYCARWGGGAFDIWGQGTMVTVSSGGGGSGGGGSGGGGSEIVLTQSPGTLSLSPGERATLSCRASQSVGGYLAWYQQKPGQAPRLLIYDASNRATGIPARFSGSGSGTDFTLTISSLEPEDFAVYYCQQRNNWPPMYTFGQGTKLEIKRAAAIEVMYPPPYLDNEKSNGTIIHVKGKHLCPSPLFPGPSKPFWVLVVVGGVLACYSLLVTVAFIIFWVRSKRSRLLHSDYMNMTPRRPGPTRKHYQPYAPPRDFAAYRSRVKFSRSADAPAYQQGQNQLYNELNLGRREEYDVLDKRRGRDPEMGGKPRRKNPQEGLYNELQKDKMAEAYSEIGMKGERRRGKGHDGLYQGLSTATKDTYDALHMQALPPR

SEQ ID NO: 1935 - protein, 468 aa, Artificial Sequence
  source: /note="Description of Artificial Sequence: Synthetic Chimeric Antigen Receptor sequence"
QVQLVQSGAEVKKPGSSVKVSCKASGGTFSSYAISWVRQAPGQGLEWMGGIIPILGTANYAQKFQGRVTITADESTSTAYMELSSLRSEDTAVYYCARWGGGAFDIWGQGTMVTVSSGGGGSGGGGSGGGGSEIVLTQSPGTLSLSPGERATLSCRASQSVGGYLAWYQQKPGQAPRLLIYDASNRATGIPARFSGSGSGTDFTLTISSLEPEDFAVYYCQQRNNWPPMYTFGQGTKLEIKRAAATTTPAPRPPTPAPTIASQPLSLRPEACRPAAGGAVHTRGLDFACDIYIWAPLAGTCGVLLLSLVITLYCKRGRKKLLYIFKQPFMRPVQTTQEEDGCSCRFPEEEEGGCELRVKFSRSADAPAYKQGQNQLYNELNLGRREEYDVLDKRRGRDPEMGGKPRRKNPQEGLYNELQKDKMAEAYSEIGMKGERRRGKGHDGLYQGLSTATKDTYDALHMQALPPR

SEQ ID NO: 1936 - protein, 528 aa, Artificial Sequence
  source: /note="Description of Artificial Sequence: Synthetic Chimeric Antigen Receptor sequence"
QVQLVQSGAEVKKPGSSVKVSCKASGGTFSSYAISWVRQAPGQGLEWMGGIIPILGTANYAQKFQGRVTITADESTSTAYMELSSLRSEDTAVYYCARWGGGAFDIWGQGTMVTVSSGGGGSGGGGSGGGGSEIVLTQSPGTLSLSPGERATLSCRASQSVGGYLAWYQQKPGQAPRLLIYDASNRATGIPARFSGSGSGTDFTLTISSLEPEDFAVYYCQQRNNWPPMYTFGQGTKLEIKRAAAFVPVFLPAKPTTTPAPRPPTPAPTIASQPLSLRPEACRPAAGGAVHTRGLDFACDIYIWAPLAGTCGVLLLSLVITLYCNHRNRSKRSRLLHSDYMNMTPRRPGPTRKHYQPYAPPRDFAAYRSRFSVVKRGRKKLLYIFKQPFMRPVQTTQEEDGCSCRFPEEEEGGCELRVKFSRSADAPAYQQGQNQLYNELNLGRREEYDVLDKRRGRDPEMGGKPRRKNPQEGLYNELQKDKMAEAYSEIGMKGERRRGKGHDGLYQGLSTATKDTYDALHMQALPPR

SEQ ID NO: 1937 - protein, 701 aa, Artificial Sequence
  source: /note="Description of Artificial Sequence: Synthetic Chimeric Antigen Receptor sequence"
QVQLVQSGAEVKKPGSSVKVSCKASGGTFSSYAISWVRQAPGQGLEWMGGIIPILGTANYAQKFQGRVTITADESTSTAYMELSSLRSEDTAVYYCARWGGGAFDIWGQGTMVTVSSGGGGSGGGGSGGGGSEIVLTQSPGTLSLSPGERATLSCRASQSVGGYLAWYQQKPGQAPRLLIYDASNRATGIPARFSGSGSGTDFTLTISSLEPEDFAVYYCQQRNNWPPMYTFGQGTKLEIKRAEPKSCDKTHTCPPCPAPELLGGPSVFLFPPKPKDTLMISRTPEVTCVVVDVSHEDPEVKFNWYVDGVEVHNAKTKPREEQYNSTYRVVSVLTVLHQDWLNGKEYKCKVSNKALPAPIEKTISKAKGQPREPQVYTLPPSRDELTKNQVSLTCLVKGFYPSDIAVEWESNGQPENNYKTTPPVLDSDGSFFLYSKLTVDKSRWQQGNVFSCSVMHEALHNHYTQKSLSLSPGKKDPKAAAIEVMYPPPYLDNEKSNGTIIHVKGKHLCPSPLFPGPSKPFWVLVVVGGVLACYSLLVTVAFIIFWVRSKRSRLLHSDYMNMTPRRPGPTRKHYQPYAPPRDFAAYRSRVKFSRSADAPAYQQGQNQLYNELNLGRREEYDVLDKRRGRDPEMGGKPRRKNPQEGLYNELQKDKMAEAYSEIGMKGERRRGKGHDGLYQGLSTATKDTYDALHMQALPPR

SEQ ID NO: 1938 - protein, 466 aa, Artificial Sequence
  source: /note="Description of Artificial Sequence: Synthetic Chimeric Antigen Receptor sequence"
QVQLQQSGAEVKKPGSSVKVSCKASGGTFSSYAISWVRQAPGQGLEWMGGIIPILGIANYAQKFQGRVTITADESTSTAYMELSSLRSEDTAVYYCATGGSGRYALDIWGQGTMVTVSSGGGGSGGGGSGGGGSEIVLTQSPATLSLSPGERATLSCRASQSVSSYLAWYQQKPGQAPRLLIYDASNRATGIPARFSGSGSGTDFTLTISSLEPEDFAVYYCQQRSNWPPSYTFGQGTKLEIKRAAAIEVMYPPPYLDNEKSNGTIIHVKGKHLCPSPLFPGPSKPFWVLVVVGGVLACYSLLVTVAFIIFWVRSKRSRLLHSDYMNMTPRRPGPTRKHYQPYAPPRDFAAYRSRVKFSRSADAPAYQQGQNQLYNELNLGRREEYDVLDKRRGRDPEMGGKPRRKNPQEGLYNELQKDKMAEAYSEIGMKGERRRGKGHDGLYQGLSTATKDTYDALHMQALPPR

SEQ ID NO: 1939 - protein, 470 aa, Artificial Sequence
  source: /note="Description of Artificial Sequence: Synthetic Chimeric Antigen Receptor sequence"
QVQLQQSGAEVKKPGSSVKVSCKASGGTFSSYAISWVRQAPGQGLEWMGGIIPILGIANYAQKFQGRVTITADESTSTAYMELSSLRSEDTAVYYCATGGSGRYALDIWGQGTMVTVSSGGGGSGGGGSGGGGSEIVLTQSPATLSLSPGERATLSCRASQSVSSYLAWYQQKPGQAPRLLIYDASNRATGIPARFSGSGSGTDFTLTISSLEPEDFAVYYCQQRSNWPPSYTFGQGTKLEIKRAAATTTPAPRPPTPAPTIASQPLSLRPEACRPAAGGAVHTRGLDFACDIYIWAPLAGTCGVLLLSLVITLYCKRGRKKLLYIFKQPFMRPVQTTQEEDGCSCRFPEEEEGGCELRVKFSRSADAPAYKQGQNQLYNELNLGRREEYDVLDKRRGRDPEMGGKPRRKNPQEGLYNELQKDKMAEAYSEIGMKGERRRGKGHDGLYQGLSTATKDTYDALHMQALPPR

SEQ ID NO: 1940 - protein, 530 aa, Artificial Sequence
  source: /note="Description of Artificial Sequence: Synthetic Chimeric Antigen Receptor sequence"
QVQLQQSGAEVKKPGSSVKVSCKASGGTFSSYAISWVRQAPGQGLEWMGGIIPILGIANYAQKFQGRVTITADESTSTAYMELSSLRSEDTAVYYCATGGSGRYALDIWGQGTMVTVSSGGGGSGGGGSGGGGSEIVLTQSPATLSLSPGERATLSCRASQSVSSYLAWYQQKPGQAPRLLIYDASNRATGIPARFSGSGSGTDFTLTISSLEPEDFAVYYCQQRSNWPPSYTFGQGTKLEIKRAAAFVPVFLPAKPTTTPAPRPPTPAPTIASQPLSLRPEACRPAAGGAVHTRGLDFACDIYIWAPLAGTCGVLLLSLVITLYCNHRNRSKRSRLLHSDYMNMTPRRPGPTRKHYQPYAPPRDFAAYRSRFSVVKRGRKKLLYIFKQPFMRPVQTTQEEDGCSCRFPEEEEGGCELRVKFSRSADAPAYQQGQNQLYNELNLGRREEYDVLDKRRGRDPEMGGKPRRKNPQEGLYNELQKDKMAEAYSEIGMKGERRRGKGHDGLYQGLSTATKDTYDALHMQALPPR

SEQ ID NO: 1941 - protein, 496 aa, Artificial Sequence
  source: /note="Description of Artificial Sequence: Synthetic Chimeric Antigen Receptor sequence"
MVATLLVTSLLLCELPHPAFLLIPDTEVQLVESGGGLVQPGGSLRLSCAASGFTFSSFGMHWVRQAPGKGLEWVAYISSDSSAIYYADTVKGRFTISRDNAKNSLYLQMNSLRDEDTAVYYCGRGRENIYYGSRLDYWGQGTTVTVSSGGGGSGGGGSGGGGSDIQLTQSPSFLSASVGDRVTITCKASQNVDTNVAWYQQKPGKAPKALIYSASYRYSGVPSRFSGSGSGTDFTLTISSLQPEDFATYYCQQYNNYPFTFGQGTKLEIKAAATTTPAPRPPTPAPTIASQPLSLRPEACRPAAGGAVHTRGLDFACDIYIWAPLAGTCGVLLLSLVITLYCKRGRKKLLYIFKQPFMRPVQTTQEEDGCSCRFPEEEEGGCELRVKFSRSADAPAYKQGQNQLYNELNLGRREEYDVLDKRRGRDPEMGGKPRRKNPQEGLYNELQKDKMAEAYSEIGMKGERRRGKGHDGLYQGLSTATKDTYDALHMQALPPR

SEQ ID NO: 1942 - protein, 978 aa, Artificial Sequence
  source: /note="Description of Artificial Sequence: Synthetic Chimeric Antigen Receptor sequence"
MDFQVQIFSFLLISASVIMSRMAQVQLQQSGAELARPGASVKMSCKASGYTFTTYTIHWVRRRPGHDLEWIGYINPSSGCSDYNQNFKGKTTLTADKSSNTAYMQLNSLTSEDSAVYYCARRADYGNYEYTWFAYWGQGTTVTVSSSGGGSGGGGSGGGGSVIELTQSPKFMSTSVGDRVNVTYKASQNVGTNVAWFQQKPGQSPKVLIYSASYRYSGVPDRFTGSGSGTDFTLTISNVQSEDLAEYFCQQYHTYPLTFGGGTKLEIKRAAAGGGGSGGGGSGGGGSGGGGSGGGGSGGGGSGGGGSGGGGSVDMAQVQLQESGGGLVQPGGSLKLSCAASGFTFSSYGMSWVRQTPDKRLELVATINSNGGSTYYPDSVKGRFTISRDNAKNTLYLQMSSLKSEDTAMYYCARDRDGYDEGFDYWGQGTTVTVSSGGGGSGGGGSGGGGSDIELTQSPSIMSASPGEKVTMTCSASSSVSYMHWYQQKSGTSPKRWIYDTSKLASGVPARFSGSGSGTSYSLTISSMEAEDAATYYCQQWSSNPPTLGRRTQLQLKRADPAEPKSPDKTHTCPPCPAPPVAGPSVFLFPPKPKDTLMIARTPEVTCVVVDVSHEDPEVKFNWYVDGVEVHNAKTKPREEQYNSTYRVVSVLTVLHQDWLNGKEYKCKVSNKALPAPIEKTISKAKGQPREPQVYTLPPSRDELTKNQVSLTCLVKGFYPSDIAVEWESNGQPENNYKTTPPVLDSDGSFFLYSKLTVDKSRWQQGNVFSCSVMHEALHNHYTQKSLSLSPGKKDPKFWVLVVVGGVLACYSLLVTVAFIIFWVRSKRSRLLHSDYMNMTPRRPGPTRKHYQAYAAARDFAAYRSLRVKFSRSADAPAYQQGQNQLYNELNLGRREEYDVLDKRRGRDPEMGGKPRRKNPQEGLYNELQKDKMAEAYSEIGMKGERRRGKGHDGLYQGLSTATKDTYDALHMQALPPR

SEQ ID NO: 1943 - protein, 252 aa, Artificial Sequence; identical to SEQ ID NO: 354
  source: /note="Description of Artificial Sequence: Synthetic Chimeric Antigen Receptor sequence"

SEQ ID NO: 1944 - protein, 494 aa, Artificial Sequence
  source: /note="Description of Artificial Sequence: Synthetic Chimeric Antigen Receptor sequence"
MALPVTALLLPLALLLHAARPQVQLVQSGAEVKKPGESLKISCKGSGYSFTSYWIGWVRQMPGKGLEWMGIIYPGDSDTRYSPSFQGQVTISADKSISTAYLQWSSLKASDTAMYYCARLGGSLPDYGMDVWGQGTMVTVSSASGGGGSGGGGSGGGGSEIVLTQSPLSLPVTPGEPASISCRSSQSLLHSNGYNYLDWYLQKPGQSPQLLIYLGSNRASGVPDRFSGSGSGTDFTLKISRVEAEDVGVYYCMQALQTLITFGQGTKVDIKTTTPAPRPPTPAPTIASQPLSLRPEACRPAAGGAVHTRGLDFACDIYIWAPLAGTCGVLLLSLVITLYCKRGRKKLLYIFKQPFMRPVQTTQEEDGCSCRFPEEEEGGCELRVKFSRSADAPAYKQGQNQLYNELNLGRREEYDVLDKRRGRDPEMGGKPRRKNPQEGLYNELQKDKMAEAYSEIGMKGERRRGKGHDGLYQGLSTATKDTYDALHMQALPPR

SEQ ID NO: 1945 - protein, 527 aa, Artificial Sequence
  source: /note="Description of Artificial Sequence: Synthetic Chimeric Antigen Receptor sequence"
GSATMAADSQTPWLLTFSLLCLLWPQEAGALPLLHESGAEVAKPGASVKMSCKASGYTFTTYWMHWIKQRPGQGLEWIGYINPSTGYTDYNQNFKDKATLTADKSSRTAYMQLSSLTSEDSTVYYCTRRGPSYGNHGAWFPYWGQGTLVTVSAVSSGGGGSGGGGSGGGGSTNIVMTQSPRSMSMSVGERVTLSCKASENVDTYVSWYQQKPEQSPKLLIYGASNRYTGVPDRFTGSGSATDFTLTISSVQAEDLADYHCGQSYRYPPTFGGGTKLEITRLSNSIMYFSHFVPVFLPAKPTTTPAPRPPTPAPTIASQPLSLRPEACRPAAGGAVHTRGLDFACDIYIWAPLAGTCGVLLLSLVITLYCRSKRGRKKLLYIFKQPFMRPVQTTQEEDGCSCRFPEEEEGGCELEFRVKFSRSADAPAYQQGQNQLYNELNLGRREEYDVLDKRRGRDPEMGGKPRRKNPQEGLYNELQKDKMAEAYSEIGMKGERRRGKGHDGLYQGLSTATKDTYDALHMQALPPR

SEQ ID NO: 1946 - protein, 442 aa, Artificial Sequence
  source: /note="Description of Artificial Sequence: Synthetic Chimeric Antigen Receptor sequence"
PLALLLHAARPEVQLLESGGGLVQPGGSLRLSCAVSGFTFNSFAMSWVRQAPGKGLEWVSAISGSGGGTYYADSVKGRFTISRDNSKNTLYLQMNSLRAEDTAVYFCAKDKILWFGEPVFDYWGQGTLVTVSSASGGGGSGGGGSGGGGSEIVLTQSPATLSLSPGERATLSCRASQSVSSYLAWYQQKPGQAPRLLIYDASNRATGIPARFSGSGSGTDFTLTISSLEPEDFAVYYCQQRSNWPPTFGQGTKVEIKGLAVSTISSFFPPGYQIYIWAPLAGTCGVLLLSLVITLYCKRGRKKLLYIFKQPFMRPVQTTQEEDGCSCRFPEEEEGGCELRVKFSRSADAPAYQQGQNQLYNELNLGRREEYDVLDKRRGRDPEMGGKPRRKNPQEGLYNELQKDKMAEAYSEIGMKGERRRGKGHDGLYQGLSTATKDTYDA

SEQ ID NO: 1947 - protein, 455 aa, Artificial Sequence
  source: /note="Description of Artificial Sequence: Synthetic Chimeric Antigen Receptor sequence"
MALPVTALLLPLALLLHAARPQVQLQQSGPELVRPGTFVKISCKASGYTFTNYDINWVNQRPGQGLEWIGWIYPGDGSTKYNEKFKAKATLTADKSSSTAYLQLNNLTSENSAVYFCASGYEDAMDYWGQGTSVTVSSGGGGSGGGGSGGGGSDIKMTQSPSSMYASLGERVIINCKASQDINSYLSWFQQKPGKSPKTLIYRANRLVDGVPSRFSGSGSGQDYSLTISSLEYEDMGIYYCLQYDEFPLTFGAGTKLELKRGLAVSTISSFFPPGYQIYIWAPLAGTCGVLLLSLVITLYCKRGRKKLLYIFKQPFMRPVQTTQEEDGCSCRFPEEEEGGCELRVKFSRSADAPAYQQGQNQLYNELNLGRREEYDVLDKRRGRDPEMGGKPRRKNPQEGLYNELQKDKMAEAYSEIGMKGERRRGKGHDGLYQGLSTATKDTYDALHMQALPPR

SEQ ID NO: 1948 - protein, 457 aa, Artificial Sequence
  source: /note="Description of Artificial Sequence: Synthetic Chimeric Antigen Receptor sequence"
MALPVTALLLPLALLLHAARPEVQLQQSGPELVKPGASVKISCKASGYTFTDYNMHWVKQSHGKSLEWIGYIYPYNGGTGYNQKFKSKATLTVDNSSSTAYMDVRSLTSEDSAVYYCARGRPAMDYWGQGTSVTVSSGGGGSGGGGSGGGGSDIVLTQSPASLAVSLGQRATISCRASESVDNYGISFMNWFQQKPGQPPKLLIYAASNQGSGVPARFSGSGSGTDFSLNIHPMEEDDTAMYFCQQSKEVPWTFGGGTKLEIKGLAVSTISSFFPPGYQIYIWAPLAGTCGVLLLSLVITLYCKRGRKKLLYIFKQPFMRPVQTTQEEDGCSCRFPEEEEGGCELRVKFSRSADAPAYQQGQNQLYNELNLGRREEYDVLDKRRGRDPEMGGKPRRKNPQEGLYNELQKDKMAEAYSEIGMKGERRRGKGHDGLYQGLSTATKDTYDALHMQALPPR

SEQ ID NO: 1949 - protein, 458 aa, Artificial Sequence
  source: /note="Description of Artificial Sequence: Synthetic Chimeric Antigen Receptor sequence"
MALPVTALLLPLALLLHAARPQVQLQQSGPELVRPGTFVKISCKASGYTFTNYDINWVNQRPGQGLEWIGWIYPGDGSTKYNEKFKAKATLTADKSSSTAYLQLNNLTSENSAVYFCASGYEDAMDYWGQGTSVTVSSGGGGSGGGGSGGGGSDIKMTQSPSSMYASLGERVIINCKASQDINSYLSWFQQKPGKSPKTLIYRANRLVDGVPSRFSGSGSGQDYSLTISSLEYEDMGIYYCLQYDEFPLTFGAGTKLELKRGLAVSTISSFFPPGYQIISFFLALTSTALLFLLFFLTLRFSVVKRGRKKLLYIFKQPFMRPVQTTQEEDGCSCRFPEEEEGGCELRVKFSRSADAPAYQQGQNQLYNELNLGRREEYDVLDKRRGRDPEMGGKPRRKNPQEGLYNELQKDKMAEAYSEIGMKGERRRGKGHDGLYQGLSTATKDTYDALHMQALPPR

SEQ ID NO: 1950 - protein, 460 aa, Artificial Sequence
  source: /note="Description of Artificial Sequence: Synthetic Chimeric Antigen Receptor sequence"
MALPVTALLLPLALLLHAARPEVQLQQSGPELVKPGASVKISCKASGYTFTDYNMHWVKQSHGKSLEWIGYIYPYNGGTGYNQKFKSKATLTVDNSSSTAYMDVRSLTSEDSAVYYCARGRPAMDYWGQGTSVTVSSGGGGSGGGGSGGGGSDIVLTQSPASLAVSLGQRATISCRASESVDNYGISFMNWFQQKPGQPPKLLIYAASNQGSGVPARFSGSGSGTDFSLNIHPMEEDDTAMYFCQQSKEVPWTFGGGTKLEIKGLAVSTISSFFPPGYQIISFFLALTSTALLFLLFFLTLRFSVVKRGRKKLLYIFKQPFMRPVQTTQEEDGCSCRFPEEEEGGCELRVKFSRSADAPAYQQGQNQLYNELNLGRREEYDVLDKRRGRDPEMGGKPRRKNPQEGLYNELQKDKMAEAYSEIGMKGERRRGKGHDGLYQGLSTATKDTYDALHMQALPPR

SEQ ID NO: 1951 - protein, 461 aa, Artificial Sequence
  source: /note="Description of Artificial Sequence: Synthetic Chimeric Antigen Receptor sequence"
MALPVTALLLPLALLLHAARPQVQLQQPGAEVVKPGASVKMSCKASGYTFTSYYIHWIKQTPGQGLEWVGVIYPGNDDISYNQKFKGKATLTADKSSTTAYMQLSSLTSEDSAVYYCAREVRLRYFDVWGAGTTVTVSSGGGGSGGGGSGGGGSNIMLTQSPSSLAVSAGEKVTMSCKSSQSVFFSSSQKNYLAWYQQIPGQSPKLLIYWASTRESGVPDRFTGSGSGTDFTLTISSVQSEDLAIYYCHQYLSSRTFGGGTKLEIKRGLAVSTISSFFPPGYQIYIWAPLAGTCGVLLLSLVITLYCKRGRKKLLYIFKQPFMRPVQTTQEEDGCSCRFPEEEEGGCELRVKFSRSADAPAYQQGQNQLYNELNLGRREEYDVLDKRRGRDPEMGGKPRRKNPQEGLYNELQKDKMAEAYSEIGMKGERRRGKGHDGLYQGLSTATKDTYDALHMQALPPR

SEQ ID NO: 1952 - protein, 462 aa, Artificial Sequence
  source: /note="Description of Artificial Sequence: Synthetic Chimeric Antigen Receptor sequence"
MALPVTALLLPLALLLHAARPQAYLQQSGAELVRSGASVKMSCKASGYTFTSYNLHWVKQTPGQGLEWIGYIYPGNGGTNYNQKFKGKATLTADTSSSTAYMQISSLTSEDSAVYFCARGGIYYYGSSLDYWGQGTTLTVSSGGGGSGGGGSGGGGSNIVLTQSPASLAVSLGQRATISCRASESVDNYGTTFMYWYQQKPGQPPKLLIYLASNLESGVPARFSGSGSGTDFTLTIDPVEADDAATYYCQQNKEDPWTFGGGTKLEIKGLAVSTISSFFPPGYQIYIWAPLAGTCGVLLLSLVITLYCKRGRKKLLYIFKQPFMRPVQTTQEEDGCSCRFPEEEEGGCELRVKFSRSADAPAYQQGQNQLYNELNLGRREEYDVLDKRRGRDPEMGGKPRRKNPQEGLYNELQKDKMAEAYSEIGMKGERRRGKGHDGLYQGLSTATKDTYDALHMQALPPR

SEQ ID NO: 1953 - protein, 464 aa, Artificial Sequence
  source: /note="Description of Artificial Sequence: Synthetic Chimeric Antigen Receptor sequence"
MALPVTALLLPLALLLHAARPQVQLQQPGAEVVKPGASVKMSCKASGYTFTSYYIHWIKQTPGQGLEWVGVIYPGNDDISYNQKFKGKATLTADKSSTTAYMQLSSLTSEDSAVYYCAREVRLRYFDVWGAGTTVTVSSGGGGSGGGGSGGGGSNIMLTQSPSSLAVSAGEKVTMSCKSSQSVFFSSSQKNYLAWYQQIPGQSPKLLIYWASTRESGVPDRFTGSGSGTDFTLTISSVQSEDLAIYYCHQYLSSRTFGGGTKLEIKRGLAVSTISSFFPPGYQIISFFLALTSTALLFLLFFLTLRFSVVKRGRKKLLYIFKQPFMRPVQTTQEEDGCSCRFPEEEEGGCELRVKFSRSADAPAYQQGQNQLYNELNLGRREEYDVLDKRRGRDPEMGGKPRRKNPQEGLYNELQKDKMAEAYSEIGMKGERRRGKGHDGLYQGLSTATKDTYDALHMQALPPR

SEQ ID NO: 1954 - protein, 465 aa, Artificial Sequence
  source: /note="Description of Artificial Sequence: Synthetic Chimeric Antigen Receptor sequence"
MALPVTALLLPLALLLHAARPEVKLQESGPELVKPGASVKMSCKASGYKFTDYVVHWLKQKPGQGLEWIGYINPYNDGTKYNEKFKGKATLTSDKSSSTAYMEVSSLTSEDSAVYYCARDYRYEVYGMDYWGQGTSVTVSSGGGGSGGGGSGGGGSDIVLTQSPTIMSASPGERVTMTCTASSSVNYIHWYQQKSGDSPLRWIFDTSKVASGVPARFSGSGSGTSYSLTISTMEAEDAATYYCQQWRSYPLTFGDGTRLELKRADAAPTVSGLAVSTISSFFPPGYQIYIWAPLAGTCGVLLLSLVITLYCKRGRKKLLYIFKQPFMRPVQTTQEEDGCSCRFPEEEEGGCELRVKFSRSADAPAYQQGQNQLYNELNLGRREEYDVLDKRRGRDPEMGGKPRRKNPQEGLYNELQKDKMAEAYSEIGMKGERRRGKGHDGLYQGLSTATKDTYDALHMQALPPR

SEQ ID NO: 1955 - protein, 468 aa, Artificial Sequence
  source: /note="Description of Artificial Sequence: Synthetic Chimeric Antigen Receptor sequence"
MALPVTALLLPLALLLHAARPEVKLQESGPELVKPGASVKMSCKASGYKFTDYVVHWLKQKPGQGLEWIGYINPYNDGTKYNEKFKGKATLTSDKSSSTAYMEVSSLTSEDSAVYYCARDYRYEVYGMDYWGQGTSVTVSSGGGGSGGGGSGGGGSDIVLTQSPTIMSASPGERVTMTCTASSSVNYIHWYQQKSGDSPLRWIFDTSKVASGVPARFSGSGSGTSYSLTISTMEAEDAATYYCQQWRSYPLTFGDGTRLELKRADAAPTVSGLAVSTISSFFPPGYQIISFFLALTSTALLFLLFFLTLRFSVVKRGRKKLLYIFKQPFMRPVQTTQEEDGCSCRFPEEEEGGCELRVKFSRSADAPAYQQGQNQLYNELNLGRREEYDVLDKRRGRDPEMGGKPRRKNPQEGLYNELQKDKMAEAYSEIGMKGERRRGKGHDGLYQGLSTATKDTYDALHMQALPPR

SEQ ID NO: 1956 - protein, 484 aa, Artificial Sequence
  source: /note="Description of Artificial Sequence: Synthetic Chimeric Antigen Receptor sequence"
MALPVTALLLPLALLLHAARPQVQLQQSGPELVRPGTFVKISCKASGYTFTNYDINWVNQRPGQGLEWIGWIYPGDGSTKYNEKFKAKATLTADKSSSTAYLQLNNLTSENSAVYFCASGYEDAMDYWGQGTSVTVSSGGGGSGGGGSGGGGSDIKMTQSPSSMYASLGERVIINCKASQDINSYLSWFQQKPGKSPKTLIYRANRLVDGVPSRFSGSGSGQDYSLTISSLEYEDMGIYYCLQYDEFPLTFGAGTKLELKRTTTPAPRPPTPAPTIASQPLSLRPEACRPAAGGAVHTRGLDFACDIYIWAPLAGTCGVLLLSLVITLYCKRGRKKLLYIFKQPFMRPVQTTQEEDGCSCRFPEEEEGGCELRVKFSRSADAPAYQQGQNQLYNELNLGRREEYDVLDKRRGRDPEMGGKPRRKNPQEGLYNELQKDKMAEAYSEIGMKGERRRGKGHDGLYQGLSTATKDTYDALHMQALPPR

SEQ ID NO: 1957 - protein, 484 aa, Artificial Sequence
  source: /note="Description of Artificial Sequence: Synthetic Chimeric Antigen Receptor sequence"
MALPVTALLLPLALLLHAARPQVQLVQSGGDLAQPGRSLRLSCAASGFTFDDYAMHWVRQAPGKGLEWVAVIWPDGGQKYYGDSVKGRFTVSRDNPKNTLYLQMNSLRAEDTAIYYCVRHFNAWDYWGQGTLVTVSSASGGGGSGGGGSGGGGSDIQLTQSPSSLSAYVGGRVTITCQASQGISQFLNWFQQKPGKAPKLLISDASNLEPGVPSRFSGSGSGTDFTFTITNLQPEDIATYYCQQYDDLPLTFGGGTKVEIKTTTPAPRPPTPAPTIASQPLSLRPEACRPAAGGAVHTRGLDFACDIYIWAPLAGTCGVLLLSLVITLYCKRGRKKLLYIFKQPFMRPVQTTQEEDGCSCRFPEEEEGGCELRVKFSRSADAPAYKQGQNQLYNELNLGRREEYDVLDKRRGRDPEMGGKPRRKNPQEGLYNELQKDKMAEAYSEIGMKGERRRGKGHDGLYQGLSTATKDTYDALHMQALPPR

SEQ ID NO: 1958 - protein, 486 aa, Artificial Sequence
  source: /note="Description of Artificial Sequence: Synthetic Chimeric Antigen Receptor sequence"
MALPVTALLLPLALLLHAARPEVQLQQSGPELVKPGASVKISCKASGYTFTDYNMHWVKQSHGKSLEWIGYIYPYNGGTGYNQKFKSKATLTVDNSSSTAYMDVRSLTSEDSAVYYCARGRPAMDYWGQGTSVTVSSGGGGSGGGGSGGGGSDIVLTQSPASLAVSLGQRATISCRASESVDNYGISFMNWFQQKPGQPPKLLIYAASNQGSGVPARFSGSGSGTDFSLNIHPMEEDDTAMYFCQQSKEVPWTFGGGTKLEIKTTTPAPRPPTPAPTIASQPLSLRPEACRPAAGGAVHTRGLDFACDIYIWAPLAGTCGVLLLSLVITLYCKRGRKKLLYIFKQPFMRPVQTTQEEDGCSCRFPEEEEGGCELRVKFSRSADAPAYQQGQNQLYNELNLGRREEYDVLDKRRGRDPEMGGKPRRKNPQEGLYNELQKDKMAEAYSEIGMKGERRRGKGHDGLYQGLSTATKDTYDALHMQALPPR

SEQ ID NO: 1959 - protein, 487 aa, Artificial Sequence
  source: /note="Description of Artificial Sequence: Synthetic Chimeric Antigen Receptor sequence"
MALPVTALLLPLALLLHAARPQVQLQQSGPELVRPGTFVKISCKASGYTFTNYDINWVNQRPGQGLEWIGWIYPGDGSTKYNEKFKAKATLTADKSSSTAYLQLNNLTSENSAVYFCASGYEDAMDYWGQGTSVTVSSGGGGSGGGGSGGGGSDIKMTQSPSSMYASLGERVIINCKASQDINSYLSWFQQKPGKSPKTLIYRANRLVDGVPSRFSGSGSGQDYSLTISSLEYEDMGIYYCLQYDEFPLTFGAGTKLELKRTTTPAPRPPTPAPTIASQPLSLRPEACRPAAGGAVHTRGLDFACDIISFFLALTSTALLFLLFFLTLRFSVVKRGRKKLLYIFKQPFMRPVQTTQEEDGCSCRFPEEEEGGCELRVKFSRSADAPAYQQGQNQLYNELNLGRREEYDVLDKRRGRDPEMGGKPRRKNPQEGLYNELQKDKMAEAYSEIGMKGERRRGKGHDGLYQGLSTATKDTYDALHMQALPPR

SEQ ID NO: 1960 - protein, 488 aa, Artificial Sequence
  source: /note="Description of Artificial Sequence: Synthetic Chimeric Antigen Receptor sequence"
MALPVTALLLPLALLLHAARPQVQLVQSGAEVKKPGESLKISCKGSGYSFTNYWIGWVRQMPGKGLEWMGIIYPGDSDTRYSPSFQGQVTISADKSISTAYLQWSSLKASDTAMYYCARHGPSSWGEFDYWGQGTLVTVSSASGGGGSGGGGSGGGGSDIRLTQSPSSLSASVGDRVTITCRASQSISSYLNWYQQKPGKAPKLLIYAASSLQSGVPSRFSGSGSGTDFTLTISSLQPEDFATYYCQQSYSTPLTFGGGTKVDIKTTTPAPRPPTPAPTIASQPLSLRPEACRPAAGGAVHTRGLDFACDIYIWAPLAGTCGVLLLSLVITLYCKRGRKKLLYIFKQPFMRPVQTTQEEDGCSCRFPEEEEGGCELRVKFSRSADAPAYKQGQNQLYNELNLGRREEYDVLDKRRGRDPEMGGKPRRKNPQEGLYNELQKDKMAEAYSEIGMKGERRRGKGHDGLYQGLSTATKDTYDALHMQALPPR

SEQ ID NO: 1961 - protein, 489 aa, Artificial Sequence
  source: /note="Description of Artificial Sequence: Synthetic Chimeric Antigen Receptor sequence"
MALPVTALLLPLALLLHAARPEVQLQQSGPELVKPGASVKISCKASGYTFTDYNMHWVKQSHGKSLEWIGYIYPYNGGTGYNQKFKSKATLTVDNSSSTAYMDVRSLTSEDSAVYYCARGRPAMDYWGQGTSVTVSSGGGGSGGGGSGGGGSDIVLTQSPASLAVSLGQRATISCRASESVDNYGISFMNWFQQKPGQPPKLLIYAASNQGSGVPARFSGSGSGTDFSLNIHPMEEDDTAMYFCQQSKEVPWTFGGGTKLEIKTTTPAPRPPTPAPTIASQPLSLRPEACRPAAGGAVHTRGLDFACDIISFFLALTSTALLFLLFFLTLRFSVVKRGRKKLLYIFKQPFMRPVQTTQEEDGCSCRFPEEEEGGCELRVKFSRSADAPAYQQGQNQLYNELNLGRREEYDVLDKRRGRDPEMGGKPRRKNPQEGLYNELQKDKMAEAYSEIGMKGERRRGKGHDGLYQGLSTATKDTYDALHMQALPPR

SEQ ID NO: 1962 - protein, 489 aa, Artificial Sequence
  source: /note="Description of Artificial Sequence: Synthetic Chimeric Antigen Receptor sequence"
MALPVTALLLPLALLLHAARPEVQLVESGGGLVQPGGSLRLSCAASGFTFSSYAMSWVRQAPGKGLEWVSAISGSGGSTYYADSVKGRFTISRDNSKNTLYLQMNSLRAEDTAVYYCAKETDYYGSGTFDYWGQGTLVTVSSASGGGGSGGGGSGGGGSDIQMTQSPSSLSASVGDRVTISCRASQGIGIYLAWYQQRSGKPPQLLIHGASTLQSGVPSRFSGSGSGTDFTLTISSLQPEDFASYWCQQSNNFPPTFGQGTKVEIKTTTPAPRPPTPAPTIASQPLSLRPEACRPAAGGAVHTRGLDFACDIYIWAPLAGTCGVLLLSLVITLYCKRGRKKLLYIFKQPFMRPVQTTQEEDGCSCRFPEEEEGGCELRVKFSRSADAPAYKQGQNQLYNELNLGRREEYDVLDKRRGRDPEMGGKPRRKNPQEGLYNELQKDKMAEAYSEIGMKGERRRGKGHDGLYQGLSTATKDTYDALHMQALPPR

SEQ ID NO: 1963 - protein, 489 aa, Artificial Sequence
  source: /note="Description of Artificial Sequence: Synthetic Chimeric Antigen Receptor sequence"
MALPVTALLLPLALLLHAARPQVQLVQSGAEVKKPGASVRVSCKASGYMFTDFFIHWVRQAPGQGLEWMGWINPNSGVTKYAQKFQGRVTMTRNTSISTAYMELSSLRSEDTAVYYCATWYSSGWYGIANIWGQGTMVTVSSASGGGGSGGGGSGGGGSDIQLTQSPSSLSASVGDRVTITCQASHDISNYLHWYQQKPGKAPKLLIYDASNLETGVPSRFTGSGSGTDFTLTIRSLQPEDVAAYYCQQSDDLPHTFGQGTKVDIKTTTPAPRPPTPAPTIASQPLSLRPEACRPAAGGAVHTRGLDFACDIYIWAPLAGTCGVLLLSLVITLYCKRGRKKLLYIFKQPFMRPVQTTQEEDGCSCRFPEEEEGGCELRVKFSRSADAPAYKQGQNQLYNELNLGRREEYDVLDKRRGRDPEMGGKPRRKNPQEGLYNELQKDKMAEAYSEIGMKGERRRGKGHDGLYQGLSTATKDTYDALHMQALPPR

SEQ ID NO: 1964 - protein, 490 aa, Artificial Sequence
  source: /note="Description of Artificial Sequence: Synthetic Chimeric Antigen Receptor sequence"
MALPVTALLLPLALLLHAARPQVQLQQPGAEVVKPGASVKMSCKASGYTFTSYYIHWIKQTPGQGLEWVGVIYPGNDDISYNQKFKGKATLTADKSSTTAYMQLSSLTSEDSAVYYCAREVRLRYFDVWGAGTTVTVSSGGGGSGGGGSGGGGSNIMLTQSPSSLAVSAGEKVTMSCKSSQSVFFSSSQKNYLAWYQQIPGQSPKLLIYWASTRESGVPDRFTGSGSGTDFTLTISSVQSEDLAIYYCHQYLSSRTFGGGTKLEIKRTTTPAPRPPTPAPTIASQPLSLRPEACRPAAGGAVHTRGLDFACDIYIWAPLAGTCGVLLLSLVITLYCKRGRKKLLYIFKQPFMRPVQTTQEEDGCSCRFPEEEEGGCELRVKFSRSADAPAYQQGQNQLYNELNLGRREEYDVLDKRRGRDPEMGGKPRRKNPQEGLYNELQKDKMAEAYSEIGMKGERRRGKGHDGLYQGLSTATKDTYDALHMQALPPR

SEQ ID NO: 1965 - protein, 492 aa, Artificial Sequence
  source: /note="Description of Artificial Sequence: Synthetic Chimeric Antigen Receptor sequence"
MALPVTALLLPLALLLHAARPQVQLVQSGGGVVQPGKSLRLSCAASGFTFSIFAMHWVRQAPGKGLEWVATISYDGSNAFYADSVEGRFTISRDNSKDSLYLQMDSLRPEDTAVYYCVKAGDGGYDVFDSWGQGTLVTVSSASGGGGSGGGGSGGGGSEIVMTQSPLSLPVTPGEPASISCRSSQSLLHSNGYNYLDWYLQKPGQSPQLLIYLGSNRASGVPDRFSGSGSGTDFTLKISRVEAEDVGVYYCMQALQTPTFGPGTKVDIKTTTPAPRPPTPAPTIASQPLSLRPEACRPAAGGAVHTRGLDFACDIYIWAPLAGTCGVLLLSLVITLYCKRGRKKLLYIFKQPFMRPVQTTQEEDGCSCRFPEEEEGGCELRVKFSRSADAPAYKQGQNQLYNELNLGRREEYDVLDKRRGRDPEMGGKPRRKNPQEGLYNELQKDKMAEAYSEIGMKGERRRGKGHDGLYQGLSTATKDTYDALHMQALPPR

SEQ ID NO: 1966 - protein, 493 aa, Artificial Sequence
  source: /note="Description of Artificial Sequence: Synthetic Chimeric Antigen Receptor sequence"
MALPVTALLLPLALLLHAARPQVQLQQPGAEVVKPGASVKMSCKASGYTFTSYYIHWIKQTPGQGLEWVGVIYPGNDDISYNQKFKGKATLTADKSSTTAYMQLSSLTSEDSAVYYCAREVRLRYFDVWGAGTTVTVSSGGGGSGGGGSGGGGSNIMLTQSPSSLAVSAGEKVTMSCKSSQSVFFSSSQKNYLAWYQQIPGQSPKLLIYWASTRESGVPDRFTGSGSGTDFTLTISSVQSEDLAIYYCHQYLSSRTFGGGTKLEIKRTTTPAPRPPTPAPTIASQPLSLRPEACRPAAGGAVHTRGLDFACDIISFFLALTSTALLFLLFFLTLRFSVVKRGRKKLLYIFKQPFMRPVQTTQEEDGCSCRFPEEEEGGCELRVKFSRSADAPAYQQGQNQLYNELNLGRREEYDVLDKRRGRDPEMGGKPRRKNPQEGLYNELQKDKMAEAYSEIGMKGERRRGKGHDGLYQGLSTATKDTYDALHMQALPPR

SEQ ID NO: 1967 - protein, 493 aa, Artificial Sequence
  source: /note="Description of Artificial Sequence: Synthetic Chimeric Antigen Receptor sequence"
MALPVTALLLPLALLLHAARPQVQLVQSGGGLVQPGGSLRLSCAASGFTFSSYAMSWVRQAPGKGLEWVSAISGSGGSTYYADSVKGRFTISRDNSKNTLYLQMNSLRAEDTAVYYCAKEDTIRGPNYYYYGMDVWGQGTTVTVSSASGGGGSGGGGSGGGGSETTLTQSPSSVSASVGDRVSITCRASQDIDTWLAWYQLKPGKAPKLLMYAASNLQGGVPSRFSGSGSGTDFILTISSLQPEDFATYYCQQASIFPPTFGGGTKVDIKTTTPAPRPPTPAPTIASQPLSLRPEACRPAAGGAVHTRGLDFACDIYIWAPLAGTCGVLLLSLVITLYCKRGRKKLLYIFKQPFMRPVQTTQEEDGCSCRFPEEEEGGCELRVKFSRSADAPAYKQGQNQLYNELNLGRREEYDVLDKRRGRDPEMGGKPRRKNPQEGLYNELQKDKMAEAYSEIGMKGERRRGKGHDGLYQGLSTATKDTYDALHMQALPPR

SEQ ID NO: 1968 - protein, 494 aa, Artificial Sequence
  source: /note="Description of Artificial Sequence: Synthetic Chimeric Antigen Receptor sequence"
MALPVTALLLPLALLLHAARPEVKLQESGPELVKPGASVKMSCKASGYKFTDYVVHWLKQKPGQGLEWIGYINPYNDGTKYNEKFKGKATLTSDKSSSTAYMEVSSLTSEDSAVYYCARDYRYEVYGMDYWGQGTSVTVSSGGGGSGGGGSGGGGSDIVLTQSPTIMSASPGERVTMTCTASSSVNYIHWYQQKSGDSPLRWIFDTSKVASGVPARFSGSGSGTSYSLTISTMEAEDAATYYCQQWRSYPLTFGDGTRLELKRADAAPTVSTTTPAPRPPTPAPTIASQPLSLRPEACRPAAGGAVHTRGLDFACDIYIWAPLAGTCGVLLLSLVITLYCKRGRKKLLYIFKQPFMRPVQTTQEEDGCSCRFPEEEEGGCELRVKFSRSADAPAYQQGQNQLYNELNLGRREEYDVLDKRRGRDPEMGGKPRRKNPQEGLYNELQKDKMAEAYSEIGMKGERRRGKGHDGLYQGLSTATKDTYDALHMQALPPR

SEQ ID NO: 1969 - protein, 494 aa, Artificial Sequence
  source: /note="Description of Artificial Sequence: Synthetic Chimeric Antigen Receptor sequence"
MALPVTALLLPLALLLHAARPQVQLVQSGAEVKKPGESLKISCKGSGYSFTSYWIGWVRQMPGKGLEWMGIIYPGDSDTRYSPSFQGQVTISADKSITTAYLQWSSLRASDSAMYYCARGGYSDYDYYFDFWGQGTLVTVSSASGGGGSGGGGSGGGGSEIVMTQSPLSLPVTPGEPASISCRSSQSLLHSNGYNYLDWYLQKPGQSPQLLIYLGSNRASGVPDRFSGSGSGTDFTLKISRVEAEDVGVYYCMQALQTPFTFGGGTKVEIKTTTPAPRPPTPAPTIASQPLSLRPEACRPAAGGAVHTRGLDFACDIYIWAPLAGTCGVLLLSLVITLYCKRGRKKLLYIFKQPFMRPVQTTQEEDGCSCRFPEEEEGGCELRVKFSRSADAPAYKQGQNQLYNELNLGRREEYDVLDKRRGRDPEMGGKPRRKNPQEGLYNELQKDKMAEAYSEIGMKGERRRGKGHDGLYQGLSTATKDTYDALHMQALPPR

SEQ ID NO: 1970 - protein, 495 aa, Artificial Sequence
  source: /note="Description of Artificial Sequence: Synthetic Chimeric Antigen Receptor sequence"
MALPVTALLLPLALLLHAARPQVQLVQSGAEVKKPGASVRVSCKASGYIFTNYYVHWVRQAPGQGLEWMGIISPSGGSPTYAQRLQGRVTMTRDLSTSTVYMELSSLTSEDTAVYFCARESRLRGNRLGLQSSIFDHWGQGTLVTVSSASGGGGSGGGGSGGGGSDIRMTQSPPSLSASVGDRVTIPCQASQDINNHLNWYQQKPGKAPQLLIYDTSNLEIGVPSRFSGSGSGTDFTLTISSLQPEDIATYYCQQYENLPLTFGGGTKVEIKTTTPAPRPPTPAPTIASQPLSLRPEACRPAAGGAVHTRGLDFACDIYIWAPLAGTCGVLLLSLVITLYCKRGRKKLLYIFKQPFMRPVQTTQEEDGCSCRFPEEEEGGCELRVKFSRSADAPAYKQGQNQLYNELNLGRREEYDVLDKRRGRDPEMGGKPRRKNPQEGLYNELQKDKMAEAYSEIGMKGERRRGKGHDGLYQGLSTATKDTYDALHMQALPPR

SEQ ID NO: 1971 - protein, 497 aa, Artificial Sequence
  source: /note="Description of Artificial Sequence: Synthetic Chimeric Antigen Receptor sequence"
MALPVTALLLPLALLLHAARPEVKLQESGPELVKPGASVKMSCKASGYKFTDYVVHWLKQKPGQGLEWIGYINPYNDGTKYNEKFKGKATLTSDKSSSTAYMEVSSLTSEDSAVYYCARDYRYEVYGMDYWGQGTSVTVSSGGGGSGGGGSGGGGSDIVLTQSPTIMSASPGERVTMTCTASSSVNYIHWYQQKSGDSPLRWIFDTSKVASGVPARFSGSGSGTSYSLTISTMEAEDAATYYCQQWRSYPLTFGDGTRLELKRADAAPTVSTTTPAPRPPTPAPTIASQPLSLRPEACRPAAGGAVHTRGLDFACDIISFFLALTSTALLFLLFFLTLRFSVVKRGRKKLLYIFKQPFMRPVQTTQEEDGCSCRFPEEEEGGCELRVKFSRSADAPAYQQGQNQLYNELNLGRREEYDVLDKRRGRDPEMGGKPRRKNPQEGLYNELQKDKMAEAYSEIGMKGERRRGKGHDGLYQGLSTATKDTYDALHMQALPPR

SEQ ID NO: 1972 - protein, 652 aa, Artificial Sequence
  source: /note="Description of Artificial Sequence: Synthetic Chimeric Antigen Receptor sequence"
QVQLQQSGPELVRPGTFVKISCKASGYTFTNYDINWVNQRPGQGLEWIGWIYPGDGSTKYNEKFKAKATLTADKSSSTAYLQLNNLTSENSAVYFCASGYEDAMDYWGQGTSVTVSSGGGGSGGGGSGGGGSDIKMTQSPSSMYASLGERVIINCKASQDINSYLSWFQQKPGKSPKTLIYRANRLVDGVPSRFSGSGSGQDYSLTISSLEYEDMGIYYCLQYDEFPLTFGAGTKLELKREPKSPDKTHTCPPCPAPPVAGPSVFLFPPKPKDTLMIARTPEVTCVVVDVSHEDPEVKFNWYVDGVEVHNAKTKPREEQYNSTYRVVSVLTVLHQDWLNGKEYKCKVSNKALPAPIEKTISKAKGQPREPQVYTLPPSRDELTKNQVSLTCLVKGFYPSDIAVEWESNGQPENNYKTTPPVLDSDGSFFLYSKLTVDKSRWQQGNVFSCSVMHEALHNHYTQKSLSLSPGKIISFFLALTSTALLFLLFFLTLRFSVVKRGRKKLLYIFKQPFMRPVQTTQEEDGCSCRFPEEEEGGCELRVKFSRSADAPAYQQGQNQLYNELNLGRREEYDVLDKRRGRDPEMGGKPRRKNPQEGLYNELQKDKMAEAYSEIGMKGERRRGKGHDGLYQGLSTATKDTYDALHMQALPPR

SEQ ID NO: 1973 - protein, 670 aa, Artificial Sequence
  source: /note="Description of Artificial Sequence: Synthetic Chimeric Antigen Receptor sequence"
MALPVTALLLPLALLLHAARPQVQLQQSGPELVRPGTFVKISCKASGYTFTNYDINWVNQRPGQGLEWIGWIYPGDGSTKYNEKFKAKATLTADKSSSTAYLQLNNLTSENSAVYFCASGYEDAMDYWGQGTSVTVSSGGGGSGGGGSGGGGSDIKMTQSPSSMYASLGERVIINCKASQDINSYLSWFQQKPGKSPKTLIYRANRLVDGVPSRFSGSGSGQDYSLTISSLEYEDMGIYYCLQYDEFPLTFGAGTKLELKREPKSPDKTHTCPPCPAPPVAGPSVFLFPPKPKDTLMIARTPEVTCVVVDVSHEDPEVKFNWYVDGVEVHNAKTKPREEQYNSTYRVVSVLTVLHQDWLNGKEYKCKVSNKALPAPIEKTISKAKGQPREPQVYTLPPSRDELTKNQVSLTCLVKGFYPSDIAVEWESNGQPENNYKTTPPVLDSDGSFFLYSKLTVDKSRWQQGNVFSCSVMHEALHNHYTQKSLSLSPGKIYIWAPLAGTCGVLLLSLVITLYCKRGRKKLLYIFKQPFMRPVQTTQEEDGCSCRFPEEEEGGCELRVKFSRSADAPAYQQGQNQLYNELNLGRREEYDVLDKRRGRDPEMGGKPRRKNPQEGLYNELQKDKMAEAYSEIGMKGERRRGKGHDGLYQGLSTATKDTYDALHMQALPPR

SEQ ID NO: 1974 - protein, 672 aa, Artificial Sequence
  source: /note="Description of Artificial Sequence: Synthetic Chimeric Antigen Receptor sequence"
MALPVTALLLPLALLLHAARPEVQLQQSGPELVKPGASVKISCKASGYTFTDYNMHWVKQSHGKSLEWIGYIYPYNGGTGYNQKFKSKATLTVDNSSSTAYMDVRSLTSEDSAVYYCARGRPAMDYWGQGTSVTVSSGGGGSGGGGSGGGGSDIVLTQSPASLAVSLGQRATISCRASESVDNYGISFMNWFQQKPGQPPKLLIYAASNQGSGVPARFSGSGSGTDFSLNIHPMEEDDTAMYFCQQSKEVPWTFGGGTKLEIKEPKSPDKTHTCPPCPAPPVAGPSVFLFPPKPKDTLMIARTPEVTCVVVDVSHEDPEVKFNWYVDGVEVHNAKTKPREEQYNSTYRVVSVLTVLHQDWLNGKEYKCKVSNKALPAPIEKTISKAKGQPREPQVYTLPPSRDELTKNQVSLTCLVKGFYPSDIAVEWESNGQPENNYKTTPPVLDSDGSFFLYSKLTVDKSRWQQGNVFSCSVMHEALHNHYTQKSLSLSPGKIYIWAPLAGTCGVLLLSLVITLYCKRGRKKLLYIFKQPFMRPVQTTQEEDGCSCRFPEEEEGGCELRVKFSRSADAPAYQQGQNQLYNELNLGRREEYDVLDKRRGRDPEMGGKPRRKNPQEGLYNELQKDKMAEAYSEIGMKGERRRGKGHDGLYQGLSTATKDTYDALHMQALPPR

SEQ ID NO: 1975 - protein, 673 aa, Artificial Sequence
  source: /note="Description of Artificial Sequence: Synthetic Chimeric Antigen Receptor sequence"
MALPVTALLLPLALLLHAARPQVQLQQSGPELVRPGTFVKISCKASGYTFTNYDINWVNQRPGQGLEWIGWIYPGDGSTKYNEKFKAKATLTADKSSSTAYLQLNNLTSENSAVYFCASGYEDAMDYWGQGTSVTVSSGGGGSGGGGSGGGGSDIKMTQSPSSMYASLGERVIINCKASQDINSYLSWFQQKPGKSPKTLIYRANRLVDGVPSRFSGSGSGQDYSLTISSLEYEDMGIYYCLQYDEFPLTFGAGTKLELKREPKSPDKTHTCPPCPAPPVAGPSVFLFPPKPKDTLMIARTPEVTCVVVDVSHEDPEVKFNWYVDGVEVHNAKTKPREEQYNSTYRVVSVLTVLHQDWLNGKEYKCKVSNKALPAPIEKTISKAKGQPREPQVYTLPPSRDELTKNQVSLTCLVKGFYPSDIAVEWESNGQPENNYKTTPPVLDSDGSFFLYSKLTVDKSRWQQGNVFSCSVMHEALHNHYTQKSLSLSPGKIISFFLALTSTALLFLLFFLTLRFSVVKRGRKKLLYIFKQPFMRPVQTTQEEDGCSCRFPEEEEGGCELRVKFSRSADAPAYQQGQNQLYNELNLGRREEYDVLDKRRGRDPEMGGKPRRKNPQEGLYNELQKDKMAEAYSEIGMKGERRRGKGHDGLYQGLSTATKDTYDALHMQALPPR

SEQ ID NO: 1976 - protein, 675 aa, Artificial Sequence
  source: /note="Description of Artificial Sequence: Synthetic Chimeric Antigen Receptor sequence"
MALPVTALLLPLALLLHAARPEVQLQQSGPELVKPGASVKISCKASGYTFTDYNMHWVKQSHGKSLEWIGYIYPYNGGTGYNQKFKSKATLTVDNSSSTAYMDVRSLTSEDSAVYYCARGRPAMDYWGQGTSVTVSSGGGGSGGGGSGGGGSDIVLTQSPASLAVSLGQRATISCRASESVDNYGISFMNWFQQKPGQPPKLLIYAASNQGSGVPARFSGSGSGTDFSLNIHPMEEDDTAMYFCQQSKEVPWTFGGGTKLEIKEPKSPDKTHTCPPCPAPPVAGPSVFLFPPKPKDTLMIARTPEVTCVVVDVSHEDPEVKFNWYVDGVEVHNAKTKPREEQYNSTYRVVSVLTVLHQDWLNGKEYKCKVSNKALPAPIEKTISKAKGQPREPQVYTLPPSRDELTKNQVSLTCLVKGFYPSDIAVEWESNGQPENNYKTTPPVLDSDGSFFLYSKLTVDKSRWQQGNVFSCSVMHEALHNHYTQKSLSLSPGKIISFFLALTSTALLFLLFFLTLRFSVVKRGRKKLLYIFKQPFMRPVQTTQEEDGCSCRFPEEEEGGCELRVKFSRSADAPAYQQGQNQLYNELNLGRREEYDVLDKRRGRDPEMGGKPRRKNPQEGLYNELQKDKMAEAYSEIGMKGERRRGKGHDGLYQGLSTATKDTYDALHMQALPPR

SEQ ID NO: 1977 - protein, 676 aa, Artificial Sequence
  source: /note="Description of Artificial Sequence: Synthetic Chimeric Antigen Receptor sequence"
MALPVTALLLPLALLLHAARPQVQLQQPGAEVVKPGASVKMSCKASGYTFTSYYIHWIKQTPGQGLEWVGVIYPGNDDISYNQKFKGKATLTADKSSTTAYMQLSSLTSEDSAVYYCAREVRLRYFDVWGAGTTVTVSSGGGGSGGGGSGGGGSNIMLTQSPSSLAVSAGEKVTMSCKSSQSVFFSSSQKNYLAWYQQIPGQSPKLLIYWASTRESGVPDRFTGSGSGTDFTLTISSVQSEDLAIYYCHQYLSSRTFGGGTKLEIKREPKSPDKTHTCPPCPAPPVAGPSVFLFPPKPKDTLMIARTPEVTCVVVDVSHEDPEVKFNWYVDGVEVHNAKTKPREEQYNSTYRVVSVLTVLHQDWLNGKEYKCKVSNKALPAPIEKTISKAKGQPREPQVYTLPPSRDELTKNQVSLTCLVKGFYPSDIAVEWESNGQPENNYKTTPPVLDSDGSFFLYSKLTVDKSRWQQGNVFSCSVMHEALHNHYTQKSLSLSPGKIYIWAPLAGTCGVLLLSLVITLYCKRGRKKLLYIFKQPFMRPVQTTQEEDGCSCRFPEEEEGGCELRVKFSRSADAPAYQQGQNQLYNELNLGRREEYDVLDKRRGRDPEMGGKPRRKNPQEGLYNELQKDKMAEAYSEIGMKGERRRGKGHDGLYQGLSTATKDTYDALHMQALPPR

SEQ ID NO: 1978 - protein, 679 aa, Artificial Sequence
  source: /note="Description of Artificial Sequence: Synthetic Chimeric Antigen Receptor sequence"
MALPVTALLLPLALLLHAARPQVQLQQPGAEVVKPGASVKMSCKASGYTFTSYYIHWIKQTPGQGLEWVGVIYPGNDDISYNQKFKGKATLTADKSSTTAYMQLSSLTSEDSAVYYCAREVRLRYFDVWGAGTTVTVSSGGGGSGGGGSGGGGSNIMLTQSPSSLAVSAGEKVTMSCKSSQSVFFSSSQKNYLAWYQQIPGQSPKLLIYWASTRESGVPDRFTGSGSGTDFTLTISSVQSEDLAIYYCHQYLSSRTFGGGTKLEIKREPKSPDKTHTCPPCPAPPVAGPSVFLFPPKPKDTLMIARTPEVTCVVVDVSHEDPEVKFNWYVDGVEVHNAKTKPREEQYNSTYRVVSVLTVLHQDWLNGKEYKCKVSNKALPAPIEKTISKAKGQPREPQVYTLPPSRDELTKNQVSLTCLVKGFYPSDIAVEWESNGQPENNYKTTPPVLDSDGSFFLYSKLTVDKSRWQQGNVFSCSVMHEALHNHYTQKSLSLSPGKIISFFLALTSTALLFLLFFLTLRFSVVKRGRKKLLYIFKQPFMRPVQTTQEEDGCSCRFPEEEEGGCELRVKFSRSADAPAYQQGQNQLYNELNLGRREEYDVLDKRRGRDPEMGGKPRRKNPQEGLYNELQKDKMAEAYSEIGMKGERRRGKGHDGLYQGLSTATKDTYDALHMQALPPR

SEQ ID NO: 1979 - protein, 680 aa, Artificial Sequence
  source: /note="Description of Artificial Sequence: Synthetic Chimeric Antigen Receptor sequence"
MALPVTALLLPLALLLHAARPEVKLQESGPELVKPGASVKMSCKASGYKFTDYVVHWLKQKPGQGLEWIGYINPYNDGTKYNEKFKGKATLTSDKSSSTAYMEVSSLTSEDSAVYYCARDYRYEVYGMDYWGQGTSVTVSSGGGGSGGGGSGGGGSDIVLTQSPTIMSASPGERVTMTCTASSSVNYIHWYQQKSGDSPLRWIFDTSKVASGVPARFSGSGSGTSYSLTISTMEAEDAATYYCQQWRSYPLTFGDGTRLELKRADAAPTVSEPKSPDKTHTCPPCPAPPVAGPSVFLFPPKPKDTLMIARTPEVTCVVVDVSHEDPEVKFNWYVDGVEVHNAKTKPREEQYNSTYRVVSVLTVLHQDWLNGKEYKCKVSNKALPAPIEKTISKAKGQPREPQVYTLPPSRDELTKNQVSLTCLVKGFYPSDIAVEWESNGQPENNYKTTPPVLDSDGSFFLYSKLTVDKSRWQQGNVFSCSVMHEALHNHYTQKSLSLSPGKIYIWAPLAGTCGVLLLSLVITLYCKRGRKKLLYIFKQPFMRPVQTTQEEDGCSCRFPEEEEGGCELRVKFSRSADAPAYQQGQNQLYNELNLGRREEYDVLDKRRGRDPEMGGKPRRKNPQEGLYNELQKDKMAEAYSEIGMKGERRRGKGHDGLYQGLSTATKDTYDALHMQALPPR

SEQ ID NO: 1980 - protein, 683 aa, Artificial Sequence
  source: /note="Description of Artificial Sequence: Synthetic Chimeric Antigen Receptor sequence"
MALPVTALLLPLALLLHAARPEVKLQESGPELVKPGASVKMSCKASGYKFTDYVVHWLKQKPGQGLEWIGYINPYNDGTKYNEKFKGKATLTSDKSSSTAYMEVSSLTSEDSAVYYCARDYRYEVYGMDYWGQGTSVTVSSGGGGSGGGGSGGGGSDIVLTQSPTIMSASPGERVTMTCTASSSVNYIHWYQQKSGDSPLRWIFDTSKVASGVPARFSGSGSGTSYSLTISTMEAEDAATYYCQQWRSYPLTFGDGTRLELKRADAAPTVSEPKSPDKTHTCPPCPAPPVAGPSVFLFPPKPKDTLMIARTPEVTCVVVDVSHEDPEVKFNWYVDGVEVHNAKTKPREEQYNSTYRVVSVLTVLHQDWLNGKEYKCKVSNKALPAPIEKTISKAKGQPREPQVYTLPPSRDELTKNQVSLTCLVKGFYPSDIAVEWESNGQPENNYKTTPPVLDSDGSFFLYSKLTVDKSRWQQGNVFSCSVMHEALHNHYTQKSLSLSPGKIISFFLALTSTALLFLLFFLTLRFSVVKRGRKKLLYIFKQPFMRPVQTTQEEDGCSCRFPEEEEGGCELRVKFSRSADAPAYQQGQNQLYNELNLGRREEYDVLDKRRGRDPEMGGKPRRKNPQEGLYNELQKDKMAEAYSEIGMKGERRRGKGHDGLYQGLSTATKDTYDALHMQALPPR

SEQ ID NO: 1981 - protein, 464 aa, Artificial Sequence
  source: /note="Description of Artificial Sequence: Synthetic Chimeric Antigen Receptor sequence"
MALPVTALLLPLALLLHAARPQIQLVQSGPELKKPGETVKISCKASGYTFTKYGMNWVKQTPGKGLKWMGWINTNSGEPTYAEEFKGRFAFSLETSASTAYLQINNLKNEDTATYFCARGAYYRYDGEVSYYAMDYWGQGTSVTVSSGGGGSGGGGSGGGGSQIILTQSPAIMSASLGERVTMTCTATSSLSSSYLHWYQQKPGSSPKLWIYSTSHLASGVPARFSGGGSGTSYSLTISSMEAEDAATYYCHQYHLSPYTFGGGTKLEIKGLAVSTISSFFPPGYQIYIWAPLAGTCGVLLLSLVITLYCKRGRKKLLYIFKQPFMRPVQTTQEEDGCSCRFPEEEEGGCELRVKFSRSADAPAYQQGQNQLYNELNLGRREEYDVLDKRRGRDPEMGGKPRRKNPQEGLYNELQKDKMAEAYSEIGMKGERRRGKGHDGLYQGLSTATKDTYDALHMQALPPR

SEQ ID NO: 1982 - protein, 471 aa, Artificial Sequence
  source: /note="Description of Artificial Sequence: Synthetic Chimeric Antigen Receptor sequence"
PLALLLHAARPEVQLLESGGGLVQPGGSLRLSCAVSGFTFNSFAMSWVRQAPGKGLEWVSAISGSGGGTYYADSVKGRFTISRDNSKNTLYLQMNSLRAEDTAVYFCAKDKILWFGEPVFDYWGQGTLVTVSSASGGGGSGGGGSGGGGSEIVLTQSPATLSLSPGERATLSCRASQSVSSYLAWYQQKPGQAPRLLIYDASNRATGIPARFSGSGSGTDFTLTISSLEPEDFAVYYCQQRSNWPPTFGQGTKVEIKTTTPAPRPPTPAPTIASQPLSLRPEACRPAAGGAVHTRGLDFACDIYIWAPLAGTCGVLLLSLVITLYCKRGRKKLLYIFKQPFMRPVQTTQEEDGCSCRFPEEEEGGCELRVKFSRSADAPAYQQGQNQLYNELNLGRREEYDVLDKRRGRDPEMGGKPRRKNPQEGLYNELQKDKMAEAYSEIGMKGERRRGKGHDGLYQGLSTATKDTYDA

SEQ ID NO: 1983 - protein, 472 aa, Artificial Sequence
  source: /note="Description of Artificial Sequence: Synthetic Chimeric Antigen Receptor sequence"
MALPVTALLLPLALLLHAARPPLALLLHAARPEVQLQQSGAELVRPGASVKLSCTASGFNIKDSLIHWVKQRPEQGLEWIGWIDPEDDKTKYAPKFQDKATLTADTSSNTAYLQLSTLTSEDTAIYYCVSRYINYYFAYWGQGTTLTVSSGGGGSGGGGSGGGGSDIVMTQSPSSLTVTAGEKVTMSCKSSQSLLHSGNQRNYLTWYQQKPGQPPKLLIYWASTRESGVPDRFTGSGSGTDFTLTISSVQAEDLAVYYCQNDYDYPYTFGGGTKLEIKGLAVSTISSFFPPGYQIYIWAPLAGTCGVLLLSLVITLYCKRGRKKLLYIFKQPFMRPVQTTQEEDGCSCRFPEEEEGGCELRVKFSRSADAPAYQQGQNQLYNELNLGRREEYDVLDKRRGRDPEMGGKPRRKNPQEGLYNELQKDKMAEAYSEIGMKGERRRGKGHDGLYQGLSTATKDTYDALHMQALPPR

SEQ ID NO: 1984 - protein, 488 aa, Artificial Sequence
  source: /note="Description of Artificial Sequence: Synthetic Chimeric Antigen Receptor sequence"
MALPVTALLLPLALLLHAARPQIQLVQSGPEVKKPGETVKISCKASGYTFTNYGMNWVKQAPGKGLKWMGINTYTGEPTYADAFKGRFAFSLETSASTAYLQINNLKNEDTATYFCARDYGDYGMDYWGQGTSVTVSSGGGGSGGGGSGGGGSDIVLTQSPASLAVSLGQRATISCRASKSVSTSGYSFMHWYQQKPGQPPKLLIYLASNLESGVPARFSGSGSGTDFTLNIHPVEEEDAATYYCQHSREVPWTFGGGTKLEIKRTTTPAPRPPTPAPTIASQPLSLRPEACRPAAGGAVHTRGLDFACDIYIWAPLAGTCGVLLLSLVITLYCKRGRKKLLYIFKQPFMRPVQTTQEEDGCSCRFPEEEEGGCELRVKFSRSADAPAYQQGQNQLYNELNLGRREEYDVLDKRRGRDPEMGGKPRRKNPQEGLYNELQKDKMAEAYSEIGMKGERRRGKGHDGLYQGLSTATKDTYDALHMQALPPR

SEQ ID NO: 1985 - protein, 490 aa, Artificial Sequence
  source: /note="Description of Artificial Sequence: Synthetic Chimeric Antigen Receptor sequence"
MALPVTALLLPLALLLHAARPEVQLQQSGAELVRPGASVKLSCTASGFNIKDSLIHWVKQRPEQGLEWIGWIDPEDDKTKYAPKFQDKATLTADTSSNTAYLQLSTLTSEDTAIYYCVSRYINYYFAYWGQGTTLTVSSGGGGSGGGGSGGGGSDIVMTQSPSSLTVTAGEKVTMSCKSSQSLLHSGNQRNYLTWYQQKPGQPPKLLIYWASTRESGVPDRFTGSGSGTDFTLTISSVQAEDLAVYYCQNDYDYPYTFGGGTKLEIKTTTPAPRPPTPAPTIASQPLSLRPEACRPAAGGAVHTRGLDFACDIYIWAPLAGTCGVLLLSLVITLYCKRGRKKLLYIFKQPFMRPVQTTQEEDGCSCRFPEEEEGGCELRVKFSRSADAPAYQQGQNQLYNELNLGRREEYDVLDKRRGRDPEMGGKPRRKNPQEGLYNELQKDKMAEAYSEIGMKGERRRGKGHDGLYQGLSTATKDTYDALHMQALPPR

SEQ ID NO: 1986 - protein, 491 aa, Artificial Sequence
  source: /note="Description of Artificial Sequence: Synthetic Chimeric Antigen Receptor sequence"
MALPVTALLLPLALLLHAARPQAYLQQSGAELVRSGASVKMSCKASGYTFTSYNLHWVKQTPGQGLEWIGYIYPGNGGTNYNQKFKGKATLTADTSSSTAYMQISSLTSEDSAVYFCARGGIYYYGSSLDYWGQGTTLTVSSGGGGSGGGGSGGGGSNIVLTQSPASLAVSLGQRATISCRASESVDNYGTTFMYWYQQKPGQPPKLLIYLASNLESGVPARFSGSGSGTDFTLTIDPVEADDAATYYCQQNKEDPWTFGGGTKLEIKTTTPAPRPPTPAPTIASQPLSLRPEACRPAAGGAVHTRGLDFACDIYIWAPLAGTCGVLLLSLVITLYCKRGRKKLLYIFKQPFMRPVQTTQEEDGCSCRFPEEEEGGCELRVKFSRSADAPAYQQGQNQLYNELNLGRREEYDVLDKRRGRDPEMGGKPRRKNPQEGLYNELQKDKMAEAYSEIGMKGERRRGKGHDGLYQGLSTATKDTYDALHMQALPPR

SEQ ID NO: 1987 - protein, 493 aa, Artificial Sequence
  source: /note="Description of Artificial Sequence: Synthetic Chimeric Antigen Receptor sequence"
MALPVTALLLPLALLLHAARPQIQLVQSGPELKKPGETVKISCKASGYTFTKYGMNWVKQTPGKGLKWMGWINTNSGEPTYAEEFKGRFAFSLETSASTAYLQINNLKNEDTATYFCARGAYYRYDGEVSYYAMDYWGQGTSVTVSSGGGGSGGGGSGGGGSQIILTQSPAIMSASLGERVTMTCTATSSLSSSYLHWYQQKPGSSPKLWIYSTSHLASGVPARFSGGGSGTSYSLTISSMEAEDAATYYCHQYHLSPYTFGGGTKLEIKTTTPAPRPPTPAPTIASQPLSLRPEACRPAAGGAVHTRGLDFACDIYIWAPLAGTCGVLLLSLVITLYCKRGRKKLLYIFKQPFMRPVQTTQEEDGCSCRFPEEEEGGCELRVKFSRSADAPAYQQGQNQLYNELNLGRREEYDVLDKRRGRDPEMGGKPRRKNPQEGLYNELQKDKMAEAYSEIGMKGERRRGKGHDGLYQGLSTATKDTYDALHMQALPPR

SEQ ID NO: 1988 - protein, 535 aa, Artificial Sequence
  source: /note="Description of Artificial Sequence: Synthetic Chimeric Antigen Receptor sequence"
MALPVTALLLPLALLLHAARPDIVMTQSPDSLAVSLGERVTMNCKSSQSLLYSTNQKNYLAWYQQKPGQSPKLLIYWASTRESGVPDRFSGSGSGTDFTLTISSVQAEDVAVYYCQQYYSYRTFGGGTKLEIKGGGGSGGGGSGGGGSQVQLQQSGPEVVKPGASVKMSCKASGYTFTSYVIHWVRQKPGQGLDWIGYINPYNDGTDYDEKFKGKATLTSDTSTSTAYMELSSLRSEDTAVYYCAREKDNYATGAWFAYWGQGTLVTVSSTTTPAPRPPTPAPTIASQPLSLRPEACRPAAGGAVHTRGLDFACDIYIWAPLAGTCGVLLLSLVITLYCRSKRSRLLHSDYMNMTPRRPGPTRKHYQPYAPPRDFAAYRSKRGRKKLLYIFKQPFMRPVQTTQEEDGCSCRFPEEEEGGCELRVKFSRSADAPAYQQGQNQLYNELNLGRREEYDVLDKRRGRDPEMGGKPQRRKNPQEGLYNELQKDKMAEAYSEIGMKGERRRGKGHDGLYQGLSTATKDTYDALHMQALPPR

SEQ ID NO: 1989 - protein, 657 aa, Artificial Sequence [sequence omitted]

SEQ ID NO: 1990 - protein, 676 aa, Artificial Sequence
  source: /note="Description of Artificial Sequence: Synthetic Chimeric Antigen Receptor sequence"
MALPVTALLLPLALLLHAARPEVQLQQSGAELVRPGASVKLSCTASGFNIKDSLIHWVKQRPEQGLEWIGWIDPEDDKTKYAPKFQDKATLTADTSSNTAYLQLSTLTSEDTAIYYCVSRYINYYFAYWGQGTTLTVSSGGGGSGGGGSGGGGSDIVMTQSPSSLTVTAGEKVTMSCKSSQSLLHSGNQRNYLTWYQQKPGQPPKLLIYWASTRESGVPDRFTGSGSGTDFTLTISSVQAEDLAVYYCQNDYDYPYTFGGGTKLEIKEPKSPDKTHTCPPCPAPPVAGPSVFLFPPKPKDTLMIARTPEVTCVVVDVSHEDPEVKFNWYVDGVEVHNAKTKPREEQYNSTYRVVSVLTVLHQDWLNGKEYKCKVSNKALPAPIEKTISKAKGQPREPQVYTLPPSRDELTKNQVSLTCLVKGFYPSDIAVEWESNGQPENNYKTTPPVLDSDGSFFLYSKLTVDKSRWQQGNVFSCSVMHEALHNHYTQKSLSLSPGKIYIWAPLAGTCGVLLLSLVITLYCKRGRKKLLYIFKQPFMRPVQTTQEEDGCSCRFPEEEEGGCELRVKFSRSADAPAYQQGQNQLYNELNLGRREEYDVLDKRRGRDPEMGGKPRRKNPQEGLYNELQKDKMAEAYSEIGMKGERRRGKGHDGLYQGLSTATKDTYDALHMQALPPR

SEQ ID NO: 1991 - protein, 677 aa, Artificial Sequence
  source: /note="Description of Artificial Sequence: Synthetic Chimeric Antigen Receptor sequence"
MALPVTALLLPLALLLHAARPQAYLQQSGAELVRSGASVKMSCKASGYTFTSYNLHWVKQTPGQGLEWIGYIYPGNGGTNYNQKFKGKATLTADTSSSTAYMQISSLTSEDSAVYFCARGGIYYYGSSLDYWGQGTTLTVSSGGGGSGGGGSGGGGSNIVLTQSPASLAVSLGQRATISCRASESVDNYGTTFMYWYQQKPGQPPKLLIYLASNLESGVPARFSGSGSGTDFTLTIDPVEADDAATYYCQQNKEDPWTFGGGTKLEIKEPKSPDKTHTCPPCPAPPVAGPSVFLFPPKPKDTLMIARTPEVTCVVVDVSHEDPEVKFNWYVDGVEVHNAKTKPREEQYNSTYRVVSVLTVLHQDWLNGKEYKCKVSNKALPAPIEKTISKAKGQPREPQVYTLPPSRDELTKNQVSLTCLVKGFYPSDIAVEWESNGQPENNYKTTPPVLDSDGSFFLYSKLTVDKSRWQQGNVFSCSVMHEALHNHYTQKSLSLSPGKIYIWAPLAGTCGVLLLSLVITLYCKRGRKKLLYIFKQPFMRPVQTTQEEDGCSCRFPEEEEGGCELRVKFSRSADAPAYQQGQNQLYNELNLGRREEYDVLDKRRGRDPEMGGKPRRKNPQEGLYNELQKDKMAEAYSEIGMKGERRRGKGHDGLYQGLSTATKDTYDALHMQALPPR

SEQ ID NO: 1992 - protein, 679 aa, Artificial Sequence
  source: /note="Description of Artificial Sequence: Synthetic Chimeric Antigen Receptor sequence"
MALPVTALLLPLALLLHAARPQIQLVQSGPELKKPGETVKISCKASGYTFTKYGMNWVKQTPGKGLKWMGWINTNSGEPTYAEEFKGRFAFSLETSASTAYLQINNLKNEDTATYFCARGAYYRYDGEVSYYAMDYWGQGTSVTVSSGGGGSGGGGSGGGGSQIILTQSPAIMSASLGERVTMTCTATSSLSSSYLHWYQQKPGSSPKLWIYSTSHLASGVPARFSGGGSGTSYSLTISSMEAEDAATYYCHQYHLSPYTFGGGTKLEIKEPKSPDKTHTCPPCPAPPVAGPSVFLFPPKPKDTLMIARTPEVTCVVVDVSHEDPEVKFNWYVDGVEVHNAKTKPREEQYNSTYRVVSVLTVLHQDWLNGKEYKCKVSNKALPAPIEKTISKAKGQPREPQVYTLPPSRDELTKNQVSLTCLVKGFYPSDIAVEWESNGQPENNYKTTPPVLDSDGSFFLYSKLTVDKSRWQQGNVFSCSVMHEALHNHYTQKSLSLSPGKIYIWAPLAGTCGVLLLSLVITLYCKRGRKKLLYIFKQPFMRPVQTTQEEDGCSCRFPEEEEGGCELRVKFSRSADAPAYQQGQNQLYNELNLGRREEYDVLDKRRGRDPEMGGKPRRKNPQEGLYNELQKDKMAEAYSEIGMKGERRRGKGHDGLYQGLSTATKDTYDALHMQALPPR

SEQ ID NO: 1993 - protein, 536 aa, Artificial Sequence
  source: /note="Description of Artificial Sequence: Synthetic Chimeric Antigen Receptor sequence"
MALPVTALLLPLALLLHAARPDIVMTQSPDSLAVSLGERATINCRASKSVSTSGYSYIYWYQQKPGQPPKLLIYLASILESGVPDRFSGSGSGTDFTLTISSLQAEDVAVYYCQHSRELPWTFGQGTKVEIKGGGGSGGGGSGGGGSEEQLVESGGGLVKPGGSLRLSCAASGFSFSDCRMYWLRQAPGKGLEWIGVISVKSENYGANYAESVRGRFTISRDDSKNTVYLQMNSLKTEDTAVYYCSASYYRYDVGAWFAYWGQGTLVTVSSTTTPAPRPPTPAPTIASQPLSLRPEACRPAAGGAVHTRGLDFACDIYIWAPLAGTCGVLLLSLVITLYCRSKRSRLLHSDYMNMTPRRPGPTRKHYQPYAPPRDFAAYRSKRGRKKLLYIFKQPFMRPVQTTQEEDGCSCRFPEEEEGGCELRVKFSRSADAPAYQQGQNQLYNELNLGRREEYDVLDKRRGRDPEMGGKPQRRKNPQEGLYNELQKDKMAEAYSEIGMKGERRRGKGHDGLYQGLSTATKDTYDALHMQALPPR

SEQ ID NO: 1994 - protein, 692 aa, Artificial Sequence
  source: /note="Description of Artificial Sequence: Synthetic Chimeric Antigen Receptor sequence"
MVRGVPFRHLLLVLQLALLPAATQGKKVVLGKKGDTVELTCTASQKKSIQFHWKNSNQIKILGNQGSFLTKGPSKLNDRADSRRSLWDQGNFPLIIKNLKIEDSDTYICEVEDQKEEVQLLVFGLTANSDTHLLQGQSLTLTLESPPGSSPSVQCRSPRGKNIQGGKTLSVSQLELQDSGTWTCTVLQNQKKVEFKIDIVVLAFQKASGGGGSGGGGSQVQLLESGAEVKKPGSSVKVSCKASGDTFIRYSFTWVRQAPGQGLEWMGRIITILDVAHYAPHLQGRVTITADKSTSTVYLELRNLRSDDTAVYFCAGVYEGEADEGEYDNNGFLKHWGQGTLVTVTSGGGGSGGGGSGGGGSELELTQSPATLSVSPGERATLSCRASESVSSDLAWYQQKPGQAPRLLIYGASTRATGVPARFSGSGSGAEFTLTISSLQSEDFAVYYCQQYNNWPPRYTFGQGTRLEIKAAAIEVMYPPPYLDNEKSNGTIIHVKGKHLCPSPLFPGPSKPFWVLVVVGGVLACYSLLVTVAFIIFWVRSKRSRLLHSDYMNMTPRRPGPTRKHYQPYAPPRDFAAYRSRVKFSRSADAPAYQQGQNQLYNELNLGRREEYDVLDKRRGRDPEMGGKPRRKNPQEGLYNELQKDKMAEAYSEIGMKGERRRGKGHDGLYQGLSTATKDTYDALHMQALPPR

SEQ ID NO: 1995 - protein, 717 aa, Artificial Sequence [sequence omitted]

SEQ ID NO: 1996 - protein, 669 aa, Artificial Sequence
  source: /note="Description of Artificial Sequence: Synthetic Chimeric Antigen Receptor sequence"
MEAPAQLLFLLLLWLPDTTGEIVLTQSPATLSLSPGERATLSCSASSSINYIYWLQQKPGQAPRILIYLTSNLASGVPARFSGSGSGTDFTLTISSLEPEDFAVYYCLQWSSNPLTFGGGTKVEIKRGGGGSGGGGSGGGGSGGGGSEVQLVESGGGLVKPGGSLRLSCAASGFTFSSYDMSWVRQAPGKGLEWVSTISSGGSYTYYLDSIKGRFTISRDNAKNSLYLQMNSLRAEDTAVYYCARQGLDYWGRGTLVTVSSGDPKEACPTGLYTHSGECCKACNLGEGVAQPCGANQTVCEPCLDSVTFSDVVSATEPCKPCTECVGLQSMSAPCVEADDAVCRCAYGYYQDETTGRCEACRVCEAGSGLVFSCQDKQNTVCEECPDGTYSDEANHVDPCLPCTVCEDTERQLRECTRWADAECEEIPGRWITRSTPPEGSDSTAPSTQEPEAPPEQDLIASTVAGVVTTVMGSSQPVVTRGTTDNPKFWVLVVVGGVLACYSLLVTVAFIIFWVRSKRSRLLHSDYMNMTPRRPGPTRKHYQPYAPPRDFAAYRSRVKFSRSADAPAYQQGQNQLYNELNLGRREEYDVLDKRRGRDPEMGGKPQRRKNPQEGLYNELQKDKMAEAYSEIGMKGERRRGKGHDGLYQGLSTATKDTYDALHMQALPPR

SEQ ID NO: 1997 - protein, 251 aa, Artificial Sequence
  source: /note="Description of Artificial Sequence: Synthetic Chimeric Antigen Receptor sequence"
MEAPAQLLFLLLLWLPDTTGEIVLTQSPATLSLSPGERATLSCSASSSINYIYWLQQKPGQAPRILIYLTSNLASGVPARFSGSGSGTDFTLTISSLEPEDFAVYYCLQWSSNPLTFGGGTKVEIKRGGGGSGGGGSEVQLVESGGGLVKPGGSLRLSCAASGFTFSSYDMSWVRQAPGKGLEWVSTISSGGSYTYYLDSIKGRFTISRDNAKNSLYLQMNSLRAEDTAVYYCARQGLDYWGRGTLVTVSS

SEQ ID NO: 1998 - protein, 576 aa, Artificial Sequence
  source: /note="Description of Artificial Sequence: Synthetic Chimeric Antigen Receptor sequence"
MEAPAQLLFLLLLWLPDTTGEIVLTQSPATLSLSPGERATLSCSASSSINYIYWLQQKPGQAPRILIYLTSNLASGVPARFSGSGSGTDFTLTISSLEPEDFAVYYCLQWSSNPLTFGGGTKVEIKRGGGGSGGGGSEVQLVESGGGLVKPGGSLRLSCAASGFTFSSYDMSWVRQAPGKGLEWVSTISSGGSYTYYLDSIKGRFTISRDNAKNSLYLQMNSLRAEDTAVYYCARQGLDYWGRGTLVTVSSGDPKEACPTGLYTHSGECCKACNLGEGVAQPCGANQTVCEPCLDSVTFSDVVSATEPCKPCTECVGLQSMSAPCVEADDAVCRCAYGYYQDETTGRCEACRVCEAGSGLVFSCQDKQNTVCEECPDGTYSDEAARAADAECEEPKFWVLVVVGGVLACYSLLVTVAFIIFWVRSKRSRLLHSDYMNMTPRRPGPTRKHYQPYAPPRDFAAYRSRVKFSRSADAPAYQQGQNQLYNELNLGRREEYDVLDKRRGRDPEMGGKPRRKNPQEGLYNELQKDKMAEAYSEIGMKGERRRGKGHDGLYQGLSTATKDTYDALHMQALPPR

SEQ ID NO: 1999 - protein, 586 aa, Artificial Sequence
  source: /note="Description of Artificial Sequence: Synthetic Chimeric Antigen Receptor sequence"
MEAPAQLLFLLLLWLPDTTGEIVLTQSPATLSLSPGERATLSCSASSSINYIYWLQQKPGQAPRILIYLTSNLASGVPARFSGSGSGTDFTLTISSLEPEDFAVYYCLQWSSNPLTFGGGTKVEIKRGGGGSGGGGSGGGGSGGGGSEVQLVESGGGLVKPGGSLRLSCAASGFTFSSYDMSWVRQAPGKGLEWVSTISSGGSYTYYLDSIKGRFTISRDNAKNSLYLQMNSLRAEDTAVYYCARQGLDYWGRGTLVTVSSGDPKEACPTGLYTHSGECCKACNLGEGVAQPCGANQTVCEPCLDSVTFSDVVSATEPCKPCTECVGLQSMSAPCVEADDAVCRCAYGYYQDETTGRCEACRVCEAGSGLVFSCQDKQNTVCEECPDGTYSDEAARAADAECEEPKFWVLVVVGGVLACYSLLVTVAFIIFWVRSKRSRLLHSDYMNMTPRRPGPTRKHYQPYAPPRDFAAYRSRVKFSRSADAPAYQQGQNQLYNELNLGRREEYDVLDKRRGRDPEMGGKPRRKNPQEGLYNELQKDKMAEAYSEIGMKGERRRGKGHDGLYQGLSTATKDTYDALHMQALPPR

SEQ ID NO: 2000 - protein, 587 aa, Artificial Sequence
  source: /note="Description of Artificial Sequence: Synthetic Chimeric Antigen Receptor sequence"
MEAPAQLLFLLLLWLPDTTGEIVLTQSPATLSLSPGERATLSCSASSSINYIYWLQQKPGQAPRILIYLTSNLASGVPARFSGSGSGTDFTLTISSLEPEDFAVYYCLQWSSNPLTFGGGTKVEIKRGGGGSGGGGSGGGGSGGGGSEVQLVESGGGLVKPGGSLRLSCAASGFTFSSYDMSWVRQAPGKGLEWVSTISSGGSYTYYLDSIKGRFTISRDNAKNSLYLQMNSLRAEDTAVYYCARQGLDYWGRGTLVTVSSGDPKEACPTGLYTHSGECCKACNLGEGVAQPCGANQTVCEPCLDSVTFSDVVSATEPCKPCTECVGLQSMSAPCVEADDAVCRCAYGYYQDETTGRCEACRVCEAGSGLVFSCQDKQNTVCEECPDGTYSDEAARAADAECEEPKFWVLVVVGGVLACYSLLVTVAFIIFWVRSKRSRLLHSDYMNMTPRRPGPTRKHYQPYAPPRDFAAYRSRVKFSRSADAPAYQQGQNQLYNELNLGRREEYDVLDKRRGRDPEMGGKPQRRKNPQEGLYNELQKDKMAEAYSEIGMKGERRRGKGHDGLYQGLSTATKDTYDALHMQALPPR

SEQ ID NO: 2001 - protein, 598 aa, Artificial Sequence
  source: /note="Description of Artificial Sequence: Synthetic Chimeric Antigen Receptor sequence"
MEAPAQLLFLLLLWLPDTTGEIVLTQSPATLSLSPGERATLSCSASSSINYIYWLQQKPGQAPRILIYLTSNLASGVPARFSGSGSGTDFTLTISSLEPEDFAVYYCLQWSSNPLTFGGGTKVEIKRGGGGSGGGGSEVQLVESGGGLVKPGGSLRLSCAASGFTFSSYDMSWVRQAPGKGLEWVSTISSGGSYTYYLDSIKGRFTISRDNAKNSLYLQMNSLRAEDTAVYYCARQGLDYWGRGTLVTVSSGDPKEACPTGLYTHSGECCKACNLGEGVAQPCGANQTVCEPCLDSVTFSDVVSATEPCKPCTECVGLQSMSAPCVEADDAVCRCAYGYYQDETTGRCEACRVCEAGSGLVFSCQDKQNTVCEECPDGTYSDEANHVDPCLPCTVCEDTERQLRECTRWADAECEEPKFWVLVVVGGVLACYSLLVTVAFIIFWVRSKRSRLLHSDYMNMTPRRPGPTRKHYQPYAPPRDFAAYRSRVKFSRSADAPAYQQGQNQLYNELNLGRREEYDVLDKRRGRDPEMGGKPRRKNPQEGLYNELQKDKMAEAYSEIGMKGERRRGKGHDGLYQGLSTATKDTYDALHMQALPPR

SEQ ID NO: 2002 - protein, 608 aa, Artificial Sequence
  source: /note="Description of Artificial Sequence: Synthetic Chimeric Antigen Receptor sequence"
MEAPAQLLFLLLLWLPDTTGEIVLTQSPATLSLSPGERATLSCSASSSINYIYWLQQKPGQAPRILIYLTSNLASGVPARFSGSGSGTDFTLTISSLEPEDFAVYYCLQWSSNPLTFGGGTKVEIKRGGGGSGGGGSGGGGSGGGGSEVQLVESGGGLVKPGGSLRLSCAASGFTFSSYDMSWVRQAPGKGLEWVSTISSGGSYTYYLDSIKGRFTISRDNAKNSLYLQMNSLRAEDTAVYYCARQGLDYWGRGTLVTVSSGDPKEACPTGLYTHSGECCKACNLGEGVAQPCGANQTVCEPCLDSVTFSDVVSATEPCKPCTECVGLQSMSAPCVEADDAVCRCAYGYYQDETTGRCEACRVCEAGSGLVFSCQDKQNTVCEECPDGTYSDEANHVDPCLPCTVCEDTERQLRECTRWADAECEEPKFWVLVVVGGVLACYSLLVTVAFIIFWVRSKRSRLLHSDYMNMTPRRPGPTRKHYQPYAPPRDFAAYRSRVKFSRSADAPAYQQGQNQLYNELNLGRREEYDVLDKRRGRDPEMGGKPRRKNPQEGLYNELQKDKMAEAYSEIGMKGERRRGKGHDGLYQGLSTATKDTYDALHMQALPPR

SEQ ID NO: 2003 - protein, 609 aa, Artificial Sequence
  source: /note="Description of Artificial Sequence: Synthetic Chimeric Antigen Receptor sequence"
MEAPAQLLFLLLLWLPDTTGEIVLTQSPATLSLSPGERATLSCSASSSINYIYWLQQKPGQAPRILIYLTSNLASGVPARFSGSGSGTDFTLTISSLEPEDFAVYYCLQWSSNPLTFGGGTKVEIKRGGGGSGGGGSGGGGSGGGGSEVQLVESGGGLVKPGGSLRLSCAASGFTFSSYDMSWVRQAPGKGLEWVSTISSGGSYTYYLDSIKGRFTISRDNAKNSLYLQMNSLRAEDTAVYYCARQGLDYWGRGTLVTVSSGDPKEACPTGLYTHSGECCKACNLGEGVAQPCGANQTVCEPCLDSVTFSDVVSATEPCKPCTECVGLQSMSAPCVEADDAVCRCAYGYYQDETTGRCEACRVCEAGSGLVFSCQDKQNTVCEECPDGTYSDEANHVDPCLPCTVCEDTERQLRECTRWADAECEEPKFWVLVVVGGVLACYSLLVTVAFIIFWVRSKRSRLLHSDYMNMTPRRPGPTRKHYQPYAPPRDFAAYRSRVKFSRSADAPAYQQGQNQLYNELNLGRREEYDVLDKRRGRDPEMGGKPQRRKNPQEGLYNELQKDKMAEAYSEIGMKGERRRGKGHDGLYQGLSTATKDTYDALHMQALPPR

SEQ ID NO: 2004 - protein, 636 aa, Artificial Sequence
  source: /note="Description of Artificial Sequence: Synthetic Chimeric Antigen Receptor sequence"
MEAPAQLLFLLLLWLPDTTGEIVLTQSPATLSLSPGERATLSCSASSSINYIYWLQQKPGQAPRILIYLTSNLASGVPARFSGSGSGTDFTLTISSLEPEDFAVYYCLQWSSNPLTFGGGTKVEIKRGGGGSGGGGSEVQLVESGGGLVKPGGSLRLSCAASGFTFSSYDMSWVRQAPGKGLEWVSTISSGGSYTYYLDSIKGRFTISRDNAKNSLYLQMNSLRAEDTAVYYCARQGLDYWGRGTLVTVSSGDPKEACPTGLYTHSGECCKACNLGEGVAQPCGANQTVCEPCLDSVTFSDVVSATEPCKPCTECVGLQSMSAPCVEADDAVCRCAYGYYQDETTGRCEACRVCEAGSGLVFSCQDKQNTVCEECPDGTYSDEAARAADAECEEIPGRWITRSTPPEGSDSTAPSTQEPEAPPEQDLIASTVAGVVTTVMGSSQPVVTRGTTDNPKFWVLVVVGGVLACYSLLVTVAFIIFWVRSKRSRLLHSDYMNMTPRRPGPTRKHYQPYAPPRDFAAYRSRVKFSRSADAPAYQQGQNQLYNELNLGRREEYDVLDKRRGRDPEMGGKPRRKNPQEGLYNELQKDKMAEAYSEIGMKGERRRGKGHDGLYQGLSTATKDTYDALHMQALPPR

SEQ ID NO: 2005 - protein, 646 aa, Artificial Sequence
  source: /note="Description of Artificial Sequence: Synthetic Chimeric Antigen Receptor sequence"
MEAPAQLLFLLLLWLPDTTGEIVLTQSPATLSLSPGERATLSCSASSSINYIYWLQQKPGQAPRILIYLTSNLASGVPARFSGSGSGTDFTLTISSLEPEDFAVYYCLQWSSNPLTFGGGTKVEIKRGGGGSGGGGSGGGGSGGGGSEVQLVESGGGLVKPGGSLRLSCAASGFTFSSYDMSWVRQAPGKGLEWVSTISSGGSYTYYLDSIKGRFTISRDNAKNSLYLQMNSLRAEDTAVYYCARQGLDYWGRGTLVTVSSGDPKEACPTGLYTHSGECCKACNLGEGVAQPCGANQTVCEPCLDSVTFSDVVSATEPCKPCTECVGLQSMSAPCVEADDAVCRCAYGYYQDETTGRCEACRVCEAGSGLVFSCQDKQNTVCEECPDGTYSDEAARAADAECEEIPGRWITRSTPPEGSDSTAPSTQEPEAPPEQDLIASTVAGVVTTVMGSSQPVVTRGTTDNPKFWVLVVVGGVLACYSLLVTVAFIIFWVRSKRSRLLHSDYMNMTPRRPGPTRKHYQPYAPPRDFAAYRSRVKFSRSADAPAYQQGQNQLYNELNLGRREEYDVLDKRRGRDPEMGGKPRRKNPQEGLYNELQKDKMAEAYSEIGMKGERRRGKGHDGLYQGLSTATKDTYDALHMQALPPR

SEQ ID NO: 2006 - protein, 647 aa, Artificial Sequence
  source: /note="Description of Artificial Sequence: Synthetic Chimeric Antigen Receptor sequence"
MEAPAQLLFLLLLWLPDTTGEIVLTQSPATLSLSPGERATLSCSASSSINYIYWLQQKPGQAPRILIYLTSNLASGVPARFSGSGSGTDFTLTISSLEPEDFAVYYCLQWSSNPLTFGGGTKVEIKRGGGGSGGGGSGGGGSGGGGSEVQLVESGGGLVKPGGSLRLSCAASGFTFSSYDMSWVRQAPGKGLEWVSTISSGGSYTYYLDSIKGRFTISRDNAKNSLYLQMNSLRAEDTAVYYCARQGLDYWGRGTLVTVSSGDPKEACPTGLYTHSGECCKACNLGEGVAQPCGANQTVCEPCLDSVTFSDVVSATEPCKPCTECVGLQSMSAPCVEADDAVCRCAYGYYQDETTGRCEACRVCEAGSGLVFSCQDKQNTVCEECPDGTYSDEAARAADAECEEIPGRWITRSTPPEGSDSTAPSTQEPEAPPEQDLIASTVAGVVTTVMGSSQPVVTRGTTDNPKFWVLVVVGGVLACYSLLVTVAFIIFWVRSKRSRLLHSDYMNMTPRRPGPTRKHYQPYAPPRDFAAYRSRVKFSRSADAPAYQQGQNQLYNELNLGRREEYDVLDKRRGRDPEMGGKPQRRKNPQEGLYNELQKDKMAEAYSEIGMKGERRRGKGHDGLYQGLSTATKDTYDALHMQALPPR

SEQ ID NO: 2007 - protein, 658 aa, Artificial Sequence
  source: /note="Description of Artificial Sequence: Synthetic Chimeric Antigen Receptor sequence"
MEAPAQLLFLLLLWLPDTTGEIVLTQSPATLSLSPGERATLSCSASSSINYIYWLQQKPGQAPRILIYLTSNLASGVPARFSGSGSGTDFTLTISSLEPEDFAVYYCLQWSSNPLTFGGGTKVEIKRGGGGSGGGGSEVQLVESGGGLVKPGGSLRLSCAASGFTFSSYDMSWVRQAPGKGLEWVSTISSGGSYTYYLDSIKGRFTISRDNAKNSLYLQMNSLRAEDTAVYYCARQGLDYWGRGTLVTVSSGDPKEACPTGLYTHSGECCKACNLGEGVAQPCGANQTVCEPCLDSVTFSDVVSATEPCKPCTECVGLQSMSAPCVEADDAVCRCAYGYYQDETTGRCEACRVCEAGSGLVFSCQDKQNTVCEECPDGTYSDEANHVDPCLPCTVCEDTERQLRECTRWADAECEEIPGRWITRSTPPEGSDSTAPSTQEPEAPPEQDLIASTVAGVVTTVMGSSQPVVTRGTTDNPKFWVLVVVGGVLACYSLLVTVAFIIFWVRSKRSRLLHSDYMNMTPRRPGPTRKHYQPYAPPRDFAAYRSRVKFSRSADAPAYQQGQNQLYNELNLGRREEYDVLDKRRGRDPEMGGKPRRKNPQEGLYNELQKDKMAEAYSEIGMKGERRRGKGHDGLYQGLSTATKDTYDALHMQALPPR

SEQ ID NO: 2008 - protein, 668 aa, Artificial Sequence
  source: /note="Description of Artificial Sequence: Synthetic Chimeric Antigen Receptor sequence"
MEAPAQLLFLLLLWLPDTTGEIVLTQSPATLSLSPGERATLSCSASSSINYIYWLQQKPGQAPRILIYLTSNLASGVPARFSGSGSGTDFTLTISSLEPEDFAVYYCLQWSSNPLTFGGGTKVEIKRGGGGSGGGGSGGGGSGGGGSEVQLVESGGGLVKPGGSLRLSCAASGFTFSSYDMSWVRQAPGKGLEWVSTISSGGSYTYYLDSIKGRFTISRDNAKNSLYLQMNSLRAEDTAVYYCARQGLDYWGRGTLVTVSSGDPKEACPTGLYTHSGECCKACNLGEGVAQPCGANQTVCEPCLDSVTFSDVVSATEPCKPCTECVGLQSMSAPCVEADDAVCRCAYGYYQDETTGRCEACRVCEAGSGLVFSCQDKQNTVCEECPDGTYSDEANHVDPCLPCTVCEDTERQLRECTRWADAECEEIPGRWITRSTPPEGSDSTAPSTQEPEAPPEQDLIASTVAGVVTTVMGSSQPVVTRGTTDNPKFWVLVVVGGVLACYSLLVTVAFIIFWVRSKRSRLLHSDYMNMTPRRPGPTRKHYQPYAPPRDFAAYRSRVKFSRSADAPAYQQGQNQLYNELNLGRREEYDVLDKRRGRDPEMGGKPRRKNPQEGLYNELQKDKMAEAYSEIGMKGERRRGKGHDGLYQGLSTATKDTYDALHMQALPPR

SEQ ID NO: 2009 - protein, 708 aa, Artificial Sequence [sequence omitted]

SEQ ID NO: 2010 - protein, 526 aa, Artificial Sequence
  source: /note="Description of Artificial Sequence: Synthetic Chimeric Antigen Receptor sequence"
MALPVTALLLPLALLLHAARPDIQVTQSPSSLSASLGERISLTCRTSQDISNYLNWFQQKPDGTFKRLIYATSSLDSGVPKRFSGSGSGSDYSLTISSLESEDFADYYCLQYASYPFTFGSGTKLEIKGGGGSGGGGSGGGGSEVQLQESGPGLVKPSQTLSLTCSVTGYSITSGYYWHWIRQFPGNKLQWMGYISYSGFTNYKTSLINRISITHDTSENQFFLNLNSVTTEDTATYYCAGDRTGSWFAYWGQGTLVTVSATTTPAPRPPTPAPTIASQPLSLRPEACRPAAGGAVHTRGLDFACDIYIWAPLAGTCGVLLLSLVITLYCRSKRSRLLHSDYMNMTPRRPGPTRKHYQPYAPPRDFAAYRSKRGRKKLLYIFKQPFMRPVQTTQEEDGCSCRFPEEEEGGCELRVKFSRSADAPAYQQGQNQLYNELNLGRREEYDVLDKRRGRDPEMGGKPQRRKNPQEGLYNELQKDKMAEAYSEIGMKGERRRGKGHDGLYQGLSTATKDTYDALHMQALPPR

SEQ ID NO: 2011 - protein, 529 aa, Artificial Sequence
  source: /note="Description of Artificial Sequence: Synthetic Chimeric Antigen Receptor sequence"
MALPVTALLLPLALLLHAARPDIQMTQSPSSLSASVGDRVTITCKASQNIDKYLNWYQQKPGKAPKLLIYNTNNLQTGVPSRFSGSGSGTDFTFTISSLQPEDIATYYCLQHISRPRTFGQGTKVEIKGGGGSGGGGSGGGGSQVQLQESGPGLVRPSQTLSLTCTVSGFTFTDFYMNWVRQPPGRGLEWIGFIRDKAKGYTTEYNPSVKGRVTMLVDTSKNQFSLRLSSVTAADTAVYYCAREGHTAAPFDYWGQGSLVTVSSTTTPAPRPPTPAPTIASQPLSLRPEACRPAAGGAVHTRGLDFACDIYIWAPLAGTCGVLLLSLVITLYCRSKRSRLLHSDYMNMTPRRPGPTRKHYQPYAPPRDFAAYRSKRGRKKLLYIFKQPFMRPVQTTQEEDGCSCRFPEEEEGGCELRVKFSRSADAPAYQQGQNQLYNELNLGRREEYDVLDKRRGRDPEMGGKPQRRKNPQEGLYNELQKDKMAEAYSEIGMKGERRRGKGHDGLYQGLSTATKDTYDALHMQALPPR

SEQ ID NO: 2012 - protein, 686 aa, Artificial Sequence
  source: /note="Description of Artificial Sequence: Synthetic Chimeric Antigen Receptor sequence"
MEFGLSWLFLVAILKGVQCIDAMGNIQLVQSGPELKKPGETVKISCKASGYTFTNYGMNWVKQAPGKGLRWMGWINTHTGEPTYADDFKGRFAFSLETSASTAYLQINNLKNEDTATYFCTRRGYDWYFDVWGAGTTVTVSSGGGGSGGGGSGGGGSDIKMTQSPSSMYASLGERVTITCKASQDINSYLSWFHHKPGKSPKTLIYRANRLVDGVPSRFSGSGSGQDYSLTISSLDYEDMGIYYCQQYDESPWTFGGGTKLEMKGSGDPAEPKSPDKTHTCPPCPAPELLGGPSVFLFPPKPKDTLMISRTPEVTCVVVDVSHEDPEVKFNWYVDGVEVHNAKTKPREEQYNSTYRVVSVLTVLHQDWLNGKEYKCKVSNKALPAPIEKTISKAKGQPREPQVYTLPPSRDELTKNQVSLTCLVKGFYPSDIAVEWESNGQPENNYKTTPPVLDSDGSFFLYSKLTVDKSRWQQGNVFSCSVMHEALHNHYTQKSLSLSPGKKDPKFWVLVVVGGVLACYSLLVTVAFIIFWVRSKRSRLLHSDYMNMTPRRPGPTRKHYQPYAPPRDFAAYRSRVKFSRSADAPAYQQGQNQLYNELNLGRREEYDVLDKRRGRDPEMGGKPRRKNPQEGLYNELQKDKMAEAYSEIGMKGERRRGKGHDGLYQGLSTATKDTYDALHMQALPPR

SEQ ID NO: 2013 - protein, 540 aa, Artificial Sequence
  source: /note="Description of Artificial Sequence: Synthetic Chimeric Antigen Receptor sequence"
MALPVTALLLPLALLLHAARPGAQPAMAAYKDIQMTQTTSSLSASLGDRVTISCSASQGISNYLNWYQQKPDGTNKLLIYYTSSLHSGVPSRFSGSGSGTDYSLHSNLEPEDIATYYCQQYSKLPYTFGGGTKLEIKRGGGGSGGGGSGGGGSGGGGSEVQLVESGGGLVKPGGSLKLSCAASGLTFSSYAMSWNRQTPEKRLEWVASISSGGFTYYPDSNKGRFTISRDNARNILYLQMSSLRSEDTAMYYCARDEVRGYLDVWGAGTTVTVSSTTTPAPRPPTPAPTIASQPLSLRPEACRPAAGGAVHTRGLDFACDIYIWAPLAGTCGVLLLSLVITLYCRSKRSRLLHSDYMNMTPRRPGPTRKHYQPYAPPRDFAAYRSKRGRKKLLYIFKQPFMRPVQTTQEEDGCSCRFPEEEEGGCELRVKFSRSADAPAYQQGQNQLYNELNLGRREEYDVLDKRRGRDPEMGGKPQRRKNPQEGLYNELQKDKMAEAYSEIGMKGERRRGKGHDGLYQGLSTATKDTYDALHMQALPPR

SEQ ID NO: 2014 - protein, 244 aa, Artificial Sequence
  source: /note="Description of Artificial Sequence: Synthetic Chimeric Antigen Receptor sequence"
GVHSQVQLQESGPGLVRPSQTLSLTCTVSGFTISSGYSWHWVRQPPGRGLEWIGYIQYSGITNYNPSLKSRVTMLVDTSKNQFSLRLSSVTAADTAVYYCAREDYDYHWYFDVWGQGTTVTVSSGGGGSGGGGSGGGGSDIQLTQSPSSLSASVGDRVTITCSTSSSVSYMHWYQQKPGKAPKLLIYSTSNLASGVPSRFSGSGSGTDFTFTISSLQPEDIATYYCHQWSSYPTFGQGTKVEIK

SEQ ID NO: 2015 - protein, 459 aa, Artificial Sequence
  source: /note="Description of Artificial Sequence: Synthetic Chimeric Antigen Receptor sequence"
MALPVTALLLPLALLLHAARPQVQLVESGGGVVQPGRSLRLSCAASGFTFSSYGMHWVRQAPGKGLEWVAVIWYDGSDKYFADSVKGRFTISRDNSKNTLYLQMNSLRAEDTAVYYCARDGIAGARYVYFDYWGQGTLVTVSSGGGGSGGGGSGGGGSDIQMTQSPSSLSASVGDRVTITCRASQGISNYLAWFQQKPGKAPKSLIYAASSLQGGVPSKFSGSGSGTDFTLTISSLQPEDFATYYCQQYYNYPFTFGPGTTVDIKGLAVSTISSFFPPGYQIYIWAPLAGTCGVLLLSLVITLYCKRGRKKLLYIFKQPFMRPVQTTQEEDGCSCRFPEEEEGGCELRVKFSRSADAPAYQQGQNQLYNELNLGRREEYDVLDKRRGRDPEMGGKPRRKNPQEGLYNELQKDKMAEAYSEIGMKGERRRGKGHDGLYQGLSTATKDTYDALHMQALPPR

SEQ ID NO: 2016 - protein, 464 aa, Artificial Sequence
  source: /note="Description of Artificial Sequence: Synthetic Chimeric Antigen Receptor sequence"
MALPVTALLLPLALLLHAARPQVQLVESGGGVVQPGRSLRLSCAASGFTFSNYGIHWVRQAPGKGLEWVAVIWYDGSNKYYADSVKGRFTISRDNSKNTLYLQMNSLRAEDTAVYYCARDGGYSGYDSGFDYWGQGTLVTVSSGGGGSGGGGSGGGGSDIVMTQSPLSLPVTPGEPASISCRSSQSLLNSNGYNYLDWYLQKPGQSPQFLIYLGSYRASGVPDRFSGSGSGTDFTLRISRVEAEDVGVYYCIQTLQTPFTFGPGTKVDIKGLAVSTISSFFPPGYQIYIWAPLAGTCGVLLLSLVITLYCKRGRKKLLYIFKQPFMRPVQTTQEEDGCSCRFPEEEEGGCELRVKFSRSADAPAYQQGQNQLYNELNLGRREEYDVLDKRRGRDPEMGGKPRRKNPQEGLYNELQKDKMAEAYSEIGMKGERRRGKGHDGLYQGLSTATKDTYDALHMQALPPR

SEQ ID NO: 2017 - protein, 493 aa, Artificial Sequence
  source: /note="Description of Artificial Sequence: Synthetic Chimeric Antigen Receptor sequence"
MALPVTALLLPLALLLHAARPQVQLVESGGGVVQPGRSLRLSCAASGFTFSNYGIHWVRQAPGKGLEWVAVIWYDGSNKYYADSVKGRFTISRDNSKNTLYLQMNSLRAEDTAVYYCARDGGYSGYDSGFDYWGQGTLVTVSSGGGGSGGGGSGGGGSDIVMTQSPLSLPVTPGEPASISCRSSQSLLNSNGYNYLDWYLQKPGQSPQFLIYLGSYRASGVPDRFSGSGSGTDFTLRISRVEAEDVGVYYCIQTLQTPFTFGPGTKVDIKTTTPAPRPPTPAPTIASQPLSLRPEACRPAAGGAVHTRGLDFACDIYIWAPLAGTCGVLLLSLVITLYCKRGRKKLLYIFKQPFMRPVQTTQEEDGCSCRFPEEEEGGCELRVKFSRSADAPAYQQGQNQLYNELNLGRREEYDVLDKRRGRDPEMGGKPRRKNPQEGLYNELQKDKMAEAYSEIGMKGERRRGKGHDGLYQGLSTATKDTYDALHMQALPPR

SEQ ID NO: 2018 - protein, 488 aa, Artificial Sequence
  source: /note="Description of Artificial Sequence: Synthetic Chimeric Antigen Receptor sequence"
MALPVTALLLPLALLLHAARPQVQLVESGGGVVQPGRSLRLSCAASGFTFSSYGMHWVRQAPGKGLEWVAVIWYDGSDKYFADSVKGRFTISRDNSKNTLYLQMNSLRAEDTAVYYCARDGIAGARYVYFDYWGQGTLVTVSSGGGGSGGGGSGGGGSDIQMTQSPSSLSASVGDRVTITCRASQGISNYLAWFQQKPGKAPKSLIYAASSLQGGVPSKFSGSGSGTDFTLTISSLQPEDFATYYCQQYYNYPFTFGPGTTVDIKTTTPAPRPPTPAPTIASQPLSLRPEACRPAAGGAVHTRGLDFACDIYIWAPLAGTCGVLLLSLVITLYCKRGRKKLLYIFKQPFMRPVQTTQEEDGCSCRFPEEEEGGCELRVKFSRSADAPAYQQGQNQLYNELNLGRREEYDVLDKRRGRDPEMGGKPRRKNPQEGLYNELQKDKMAEAYSEIGMKGERRRGKGHDGLYQGLSTATKDTYDALHMQALPPR

SEQ ID NO: 2019 - protein, 584 aa, Artificial Sequence
  source: /note="Description of Artificial Sequence: Synthetic Chimeric Antigen Receptor sequence"
MALPVTALLLPLALLLHAARPQVQLVESGGGVVQPGRSLRLSCAASGFTFSNYGIHWVRQAPGKGLEWVAVIWYDGSNKYYADSVKGRFTISRDNSKNTLYLQMNSLRAEDTAVYYCARDGGYSGYDSGFDYWGQGTLVTVSSGGGGSGGGGSGGGGSDIVMTQSPLSLPVTPGEPASISCRSSQSLLNSNGYNYLDWYLQKPGQSPQFLIYLGSYRASGVPDRFSGSGSGTDFTLRISRVEAEDVGVYYCIQTLQTPFTFGPGTKVDIKEPKSPDKTHTCPPCPAPPVAGPSVFLFPPKPKDTLMIARTPEVTCVVVDVSHEDPEVKFNWYVDGVEVHNAKTKPREEQYNSTYRVVSVLTVLHQDWLNGKEYKCKVSNKALPAPIEKTISKAKGQPREPQVYTLPPSRDELTKNQVSLTCLVKGFYPSDIAVEWESNGQPENNYKTTPPVLDSDGSFFLYSKLTVDKSRWQQGNVFSCSVMHEALHNHYTQKSLSLSPGKIYIWAPLAGTCGVLLLSLVITLYCKRGRKKLLYIFKQPFMRPVQTTQEEDGCSCRFPEEEEGGCELRVKFSRSADAPAYQQGQ

SEQ ID NO: 2020 - protein, 674 aa, Artificial Sequence
  source: /note="Description of Artificial Sequence: Synthetic Chimeric Antigen Receptor sequence"
MALPVTALLLPLALLLHAARPQIQLVQSGPEVKKPGETVKISCKASGYTFTNYGMNWVKQAPGKGLKWMGINTYTGEPTYADAFKGRFAFSLETSASTAYLQINNLKNEDTATYFCARDYGDYGMDYWGQGTSVTVSSGGGGSGGGGSGGGGSDIVLTQSPASLAVSLGQRATISCRASKSVSTSGYSFMHWYQQKPGQPPKLLIYLASNLESGVPARFSGSGSGTDFTLNIHPVEEEDAATYYCQHSREVPWTFGGGTKLEIKREPKSPDKTHTCPPCPAPPVAGPSVFLFPPKPKDTLMIARTPEVTCVVVDVSHEDPEVKFNWYVDGVEVHNAKTKPREEQYNSTYRVVSVLTVLHQDWLNGKEYKCKVSNKALPAPIEKTISKAKGQPREPQVYTLPPSRDELTKNQVSLTCLVKGFYPSDIAVEWESNGQPENNYKTTPPVLDSDGSFFLYSKLTVDKSRWQQGNVFSCSVMHEALHNHYTQKSLSLSPGKIYIWAPLAGTCGVLLLSLVITLYCKRGRKKLLYIFKQPFMRPVQTTQEEDGCSCRFPEEEEGGCELRVKFSRSADAPAYQQGQNQLYNELNLGRREEYDVLDKRRGRDPEMGGKPRRKNPQEGLYNELQKDKMAEAYSEIGMKGERRRGKGHDGLYQGLSTATKDTYDALHMQALPPR

SEQ ID NO: 2021 - protein, 674 aa, Artificial Sequence
  source: /note="Description of Artificial Sequence: Synthetic Chimeric Antigen Receptor sequence"
MALPVTALLLPLALLLHAARPQVQLVESGGGVVQPGRSLRLSCAASGFTFSSYGMHWVRQAPGKGLEWVAVIWYDGSDKYFADSVKGRFTISRDNSKNTLYLQMNSLRAEDTAVYYCARDGIAGARYVYFDYWGQGTLVTVSSGGGGSGGGGSGGGGSDIQMTQSPSSLSASVGDRVTITCRASQGISNYLAWFQQKPGKAPKSLIYAASSLQGGVPSKFSGSGSGTDFTLTISSLQPEDFATYYCQQYYNYPFTFGPGTTVDIKEPKSPDKTHTCPPCPAPPVAGPSVFLFPPKPKDTLMIARTPEVTCVVVDVSHEDPEVKFNWYVDGVEVHNAKTKPREEQYNSTYRVVSVLTVLHQDWLNGKEYKCKVSNKALPAPIEKTISKAKGQPREPQVYTLPPSRDELTKNQVSLTCLVKGFYPSDIAVEWESNGQPENNYKTTPPVLDSDGSFFLYSKLTVDKSRWQQGNVFSCSVMHEALHNHYTQKSLSLSPGKIYIWAPLAGTCGVLLLSLVITLYCKRGRKKLLYIFKQPFMRPVQTTQEEDGCSCRFPEEEEGGCELRVKFSRSADAPAYQQGQNQLYNELNLGRREEYDVLDKRRGRDPEMGGKPRRKNPQEGLYNELQKDKMAEAYSEIGMKGERRRGKGHDGLYQGLSTATKDTYDALHMQALPPR

SEQ ID NO: 2022 - protein, 741 aa, Artificial Sequence
  source: /note="Description of Artificial Sequence: Synthetic Chimeric Antigen Receptor sequence"
AQLEKELQALEKENAQLEWELQALEKELAQSGGGGSADAPAYQQGQNQLYNELNLGRREEYDVLDKRRGRDPEMGGKPRRKNPQEGLYNELQKDKMAEAYSEIGMKGERRRGKGHDGLYQGLSTATKDTYDALHMQALPPRRAEGRGSLLTCGDVEENPGPMAVPTQVLGLLLLWLTDARCDIQMTQSPSSLSASVGDRVTITCRASEDIYFNLVWYQQKPGKAPKLLIYDTNRLADGVPSRFSGSGSGTQYTLTISSLQPEDFATYYCQHYKNYPLTFGQGTKLEIKRSGGGGSGGGGSGGGGSRSEVQLVESGGGLVQPGGSLRLSCAASGFTLSNYGMHWIRQAPGKGLEWVSSISLNGGSTYYRDSVKGRFTISRDNAKSTLYLQMNSLRAEDTAVYYCAAQDAYTGGYFDYWGQGTLVTVSSMPCPAPPVAGPSVFLFPPKPKDTLMIARTPEVTCVVVDVSHEDPEVKFNWYVDGVEVHNAKTKPREEQYNSTYRVVSVLTVLHQDWLNGKEYKCKVSNKALPAPIEKTISKAKPCPAPPVAGPSVFLFPPKPKDTLMIARTPEVTCVVVDVSHEDPEVKFNWYVDGVEVHNAKTKPREEQYNSTYRVVSVLTVLHQDWLNGKEYKCKVSNKALPAPIEKTISKAKMALIVLGGVAGLLLFIGLGIFFMALIVLGGVAGLLLFIGLGIFFCVRCRHRRRSGGGGSAQLEKKLQALKKKNAQLKWKLQALKKKLAQ

SEQ ID NO: 2023 - protein, 455 aa, Artificial Sequence
  source: /note="Description of Artificial Sequence: Synthetic Chimeric Antigen Receptor sequence"
MALPVTALLLPLALLLHAARPQVQLQESGPGLVKPSETLSLTCVVSGGSISSSNWWSWVRQPPGKGLEWIGEIYHSGSPNYNPSLKSRVTISVDKSKNQFSLKLSSVTAADTAVYYCARSSSGGFFDYWGQGTLVTVSSGGGGSGGGGSGGGGSDIQMTQSPSSLSASVGDRVTITCRASQSISSYLNWYQQKPGKAPKLLIYAASSLQSGVPSRFSGSGSGTDFTLTISSLQPEDFATYYCQQSYSTPPTFGQGTKVEIKGLAVSTISSFFPPGYQIYIWAPLAGTCGVLLLSLVITLYCKRGRKKLLYIFKQPFMRPVQTTQEEDGCSCRFPEEEEGGCELRVKFSRSADAPAYQQGQNQLYNELNLGRREEYDVLDKRRGRDPEMGGKPRRKNPQEGLYNELQKDKMAEAYSEIGMKGERRRGKGHDGLYQGLSTATKDTYDALHMQALPPR

SEQ ID NO: 2024 - protein, 719 aa, Artificial Sequence
  source: /note="Description of Artificial Sequence: Synthetic Chimeric Antigen Receptor sequence"
MAPAMESPTLLCVALLFFAPDGVLAMNIFLLSVLLALLPNVFTARVDQTPRTATKETGESLTINCVLRDTSCAFSSTGWYRTKLGSTNEQSISIGGRYVETVNKGSKSFSLRISDLRVEDSGTYKCQAYVIATMAPLCYASYSWNEKGAGTVLTVKPGVQPSPPVISLLYSATEEQRGNGFVQLICLISGYYFFIPLLVVILFAVDTGLFISTQQQVTFLLKIKRTRKGFRLLNPHPKPNPKNNRAEGRGSLLTCGDVEENPGPMDTESNRRANLALPQEPSSVPAFEVLEISPQEVSSGRLLKSASSPPLHTWLTVLKKEQEFLGVTQILTAMICLCFGTVVCSVLDISHIEGDIFSSFKAGYPFWGAIFFSISGMLSIISERRNATYLVRGSLGANTASSIAGGTGITILIINLKKSLAYIHIHSCQKFFETKCFMASFSTEIVVMMLFLTILGLGSAVSLTICGAGEELKGNKVPEKRGRKKLLYIFKQPFMRPVQTTQEEDGCSCRFPEEEEGGCELGSGVKQTLNFDLLKLAGDVESNPGPMIPAVVLLLLLLVEQAAALGEPQLCYILDAILFLYGIVLTLLYCRLKIQVRKAAITSYEKSRVKFSRSADAPAYQQGQNQLYNELNLGRREEYDVLDKRRGRDPEMGGKPRRKNPQEGLYNELQKDKMAEAYSEIGMKGERRRGKGHDGLYQGLSTATKDTYDALHMQALPPR

SEQ ID NO: 2025 - protein, 513 aa, Artificial Sequence
  source: /note="Description of Artificial Sequence: Synthetic Chimeric Antigen Receptor sequence"
MSVPTQVLGLLLLWLTGARCDIQMTQSPASLSASVGDTVTITCRASENIYSYLAWYQQKQGKSPQLLVYNAKALSEGVPSRFSGSGSGTQFSLRINSLQPEDFGDYYCQHHYNSPYTFGGGTKLEIKGSTSGSGKSSEGKGQIQLVQSGPELKKPGETVKISCKASGYSFTNDGINWVKQAPGKGFKYMGWINTITGEPTYTEDFKGRFAFSLETSASTAYLQINNLKDEDTATFFCAKGTGTSAYWGQGTLVTVSATSLSNSIMYFSHFVPVFLPAKPTTTPAPRPPTPAPTIASQPLSLRPEACRPAAGGAVHTRGLDSRFWVLVVVGGVLACYSLLVTVAFIIFWVRLRVKFSRSADAPAYQQGQNQLYNELNLGRREEYDVLDKRRGRDPEMGGKPQRRKNPQEGLYNELQKDKMAEAYSEIGMKGERRRGKGHDGLYQGLSTATKDTYDALHMQALPPRRSQCMWPRETQLLLEVPPSTEDARSCQFPEEERGERSAEEKGRLGDLWV

SEQ ID NO: 2026 - protein, 553 aa, Artificial Sequence
  source: /note="Description of Artificial Sequence: Synthetic Chimeric Antigen Receptor sequence"
MSVPTQVLGLLLLWLTGARCDIQMTQSPASLSASVGDTVTITCRASENIYSYLAWYQQKQGKSPQLLVYNAKALSEGVPSRFSGSGSGTQFSLRINSLQPEDFGDYYCQHHYNSPYTFGGGTKLEIKGSTSGSGKSSEGKGQIQLVQSGPELKKPGETVKISCKASGYSFTNDGINWVKQAPGKGFKYMGWINTITGEPTYTEDFKGRFAFSLETSASTAYLQINNLKDEDTATFFCAKGTGTSAYWGQGTLVTVSATSLSNSIMYFSHFVPVFLPAKPTTTPAPRPPTPAPTIASQPLSLRPEACRPAAGGAVHTRGLDSRFWVLVVVGGVLACYSLLVTVAFIIFWVRLRVKFSRSADAPAYQQGQNQLYNELNLGRREEYDVLDKRRGRDPEMGGKPQRRKNPQEGLYNELQKDKMAEAYSEIGMKGERRRGKGHDGLYQGLSTATKDTYDALHMQALPPRRSQCMWPRETQLLLEVPPSTEDARSCQFPEEERGERSAEEKGRLGDLWVSKRSRLLHSDYMNMTPRRPGPTRKHYQPYAPPRDFAAYRS

SEQ ID NO: 2027 - protein, 793 aa, Artificial Sequence
  source: /note="Description of Artificial Sequence: Synthetic Chimeric Antigen Receptor sequence"
MVSKGEELFTGVVPILVELDGDVNGHKFSVSGEGEGDATYGKLTLKFICTTGKLPVPWPTLVTTLTYGVQCFSRYPDHMKQHDFFKSAMPEGYVQERTIFFKDDGNYKTRAEVKFEGDTLVNRIELKGIDFKEDGNILGHKLEYNYNSHNVYIMADKQKNGIKVNFKIRHNIEDGSVQLADHYQQNTPIGDGPVLLPDNHYLSTQSALSKDPNEKRDHMVLLEFVTAAGITLGMDELYKSGVKQTLNFDLLKLAGDVESNPGPMALPVTALLLPLALLLHAARPDIQMTQSPASLSASVGETVTITCRASENIDSYLAWYQQKQGKSPQLLVYASTLLVDGVPSRFSGSRSGTQFSLKINSLQSEDVARYYCQHYYSIPYTFGSGTKLEIKGGGGSGGGGSGGGGSEVKLVESGGGLVKPGGSLKLSCAASGFTFNSYTMSWVRQTPAKRLEWVVTISSGGGRTYYPDSVKGRFTISRDNARNTLYLQMSSLRSEDTAMYYCIRGDYRYDGFAYWGQGTVVTVSTTTTPAPRPPTPAPTIASQPLSLRPEACRPAAGGAVHTRGLDFACDFWVLVVVGGVLACYSLLVTVAFIIFWVRSKRSRLLHSDYMNMTPRRPGPTRKHYQPYAPPRDFAAYRSKRGRKKLLYIFKQPFMRPVQTTQEEDGCSCRFPEEEEGGCELRVKFSRSADAPAYQQGQNQLYNELNLGRREEYDVLDKRRGRDPEMGGKPQRRKNPQEGLYNELQKDKMAEAYSEIGMKGERRRGKGHDGLYQGLSTATKDTYDALHMQALPPR

SEQ ID NO: 2028 - protein, 918 aa, Artificial Sequence
  source: /note="Description of Artificial Sequence: Synthetic Chimeric Antigen Receptor sequence"
MAPAMESPTLLCVALLFFAPDGVLAMNIFLLSVLLALLPNVFTARVDQTPRTATKETGESLTINCVLRDTSCAFSSTGWYRTKLGSTNEQSISIGGRYVETVNKGSKSFSLRISDLRVEDSGTYKCQAYVIATMAPLCYASYSWNEKGAGTVLTVKEPKSPDKTHTCPPCPAPPVAGPSVFLFPPKPKDTLMIARTPEVTCVVVDVSHEDPEVKFNWYVDGVEVHNAKTKPREEQYNSTYRVVSVLTVLHQDWLNGKEYKCKVSNKALPAPIEKTISKAKGQPREPQVYTLPPSRDELTKNQVSLTCLVKGFYPSDIAVEWESNGQPENNYKTTPPVLDSDGSFFLYSKLTVDKSRWQQGNVFSCSVMHEALHNHYTQKSLSLSPGKKDPKFFIPLLVVILFAVDTGLFISTQQQVTFLLKIKRTRKGFRLLNPHPKPNPKNNRAEGRGSLLTCGDVEENPGPMDTESNRRANLALPQEPSSVPAFEVLEISPQEVSSGRLLKSASSPPLHTWLTVLKKEQEFLGVTQILTAMICLCFGTVVCSVLDISHIEGDIFSSFKAGYPFWGAIFFSISGMLSIISERRNATYLVRGSLGANTASSIAGGTGITILIINLKKSLAYIHIHSCQKFFETKCFMASFSTEIVVMMLFLTILGLGSAVSLTICGAGEELKGNKVPEKRGRKKLLYIFKQPFMRPVQTTQEEDGCSCRFPEEEEGGCELGSGVKQTLNFDLLKLAGDVESNPGPMIPAVVLLLLLLVEQAAALGEPQLCYILDAILFLYGIVLTLLYCRLKIQVRKAAITSYEKSRVKFSRSADAPAYQQGQNQLYNELNLGRREEYDVLDKRRGRDPEMGGKPRRKNPQEGLYNELQKDKMAEAYSEIGMKGERRRGKGHDGLYQGLSTATKDTYDALHMQALPPR

SEQ ID NO: 2029 - protein, 728 aa, Artificial Sequence
  source: /note="Description of Artificial Sequence: Synthetic Chimeric Antigen Receptor sequence"
MAPAMESPTLLCVALLFFAPDGVLAMNIFLLSVLLALLPNVFTARVDQTPRTATKETGESLTINCVLRDTSCAFSSTGWYRTKLGSTNEQSISIGGRYVETVNKGSKSFSLRISDLRVEDSGTYKCQAYVIATMAPLCYASYSWNEKGAGTVLTVKTTTPAPRPPTPAPTIASQPLSLRPEACRPAAGGAVHTRGLDFACDFFIPLLVVILFAVDTGLFISTQQQVTFLLKIKRTRKGFRLLNPHPKPNPKNNRAEGRGSLLTCGDVEENPGPMDTESNRRANLALPQEPSSVPAFEVLEISPQEVSSGRLLKSASSPPLHTWLTVLKKEQEFLGVTQILTAMICLCFGTVVCSVLDISHIEGDIFSSFKAGYPFWGAIFFSISGMLSIISERRNATYLVRGSLGANTASSIAGGTGITILIINLKKSLAYIHIHSCQKFFETKCFMASFSTEIVVMMLFLTILGLGSAVSLTICGAGEELKGNKVPEKRGRKKLLYIFKQPFMRPVQTTQEEDGCSCRFPEEEEGGCELGSGVKQTLNFDLLKLAGDVESNPGPMIPAVVLLLLLLVEQAAALGEPQLCYILDAILFLYGIVLTLLYCRLKIQVRKAAITSYEKSRVKFSRSADAPAYQQGQNQLYNELNLGRREEYDVLDKRRGRDPEMGGKPRRKNPQEGLYNELQKDKMAEAYSEIGMKGERRRGKGHDGLYQGLSTATKDTYDALHMQALPPR

SEQ ID NO: 2030 - protein, 370 aa, Artificial Sequence
  source: /note="Description of Artificial Sequence: Synthetic Chimeric Antigen Receptor sequence"
MAPAMESPTLLCVALLFFAPDGVLAMNIFLLSVLLALLPNVFTARVDQTPRTATKETGESLTINCVLRDTSCAFSSTGWYRTKLGSTNEQSISIGGRYVETVNKGSKSFSLRISDLRVEDSGTYKCQAYVIATMAPLCYASYSWNEKGAGTVLTVKPGVQPSPPVISLLYSATEEQRGNGFVQLICLISGYYIYIWAPLAGTCGVLLLSLVITLYCKRGRKKLLYIFKQPFMRPVQTTQEEDGCSCRFPEEEEGGCELRVKFSRSADAPAYQQGQNQLYNELNLGRREEYDVLDKRRGRDPEMGGKPRRKNPQEGLYNELQKDKMAEAYSEIGMKGERRRGKGHDGLYQGLSTATKDTYDALHMQALPPR

SEQ ID NO: 2031 - protein, 569 aa, Artificial Sequence
  source: /note="Description of Artificial Sequence: Synthetic Chimeric Antigen Receptor sequence"
MAPAMESPTLLCVALLFFAPDGVLAMNIFLLSVLLALLPNVFTARVDQTPRTATKETGESLTINCVLRDTSCAFSSTGWYRTKLGSTNEQSISIGGRYVETVNKGSKSFSLRISDLRVEDSGTYKCQAYVIATMAPLCYASYSWNEKGAGTVLTVKEPKSPDKTHTCPPCPAPPVAGPSVFLFPPKPKDTLMIARTPEVTCVVVDVSHEDPEVKFNWYVDGVEVHNAKTKPREEQYNSTYRVVSVLTVLHQDWLNGKEYKCKVSNKALPAPIEKTISKAKGQPREPQVYTLPPSRDELTKNQVSLTCLVKGFYPSDIAVEWESNGQPENNYKTTPPVLDSDGSFFLYSKLTVDKSRWQQGNVFSCSVMHEALHNHYTQKSLSLSPGKKDPKIYIWAPLAGTCGVLLLSLVITLYCKRGRKKLLYIFKQPFMRPVQTTQEEDGCSCRFPEEEEGGCELRVKFSRSADAPAYQQGQNQLYNELNLGRREEYDVLDKRRGRDPEMGGKPRRKNPQEGLYNELQKDKMAEAYSEIGMKGERRRGKGHDGLYQGLSTATKDTYDALHMQALPPR

SEQ ID NO: 2032 - protein, 379 aa, Artificial Sequence
  source: /note="Description of Artificial Sequence: Synthetic Chimeric Antigen Receptor sequence"
MAPAMESPTLLCVALLFFAPDGVLAMNIFLLSVLLALLPNVFTARVDQTPRTATKETGESLTINCVLRDTSCAFSSTGWYRTKLGSTNEQSISIGGRYVETVNKGSKSFSLRISDLRVEDSGTYKCQAYVIATMAPLCYASYSWNEKGAGTVLTVKTTTPAPRPPTPAPTIASQPLSLRPEACRPAAGGAVHTRGLDFACDIYIWAPLAGTCGVLLLSLVITLYCKRGRKKLLYIFKQPFMRPVQTTQEEDGCSCRFPEEEEGGCELRVKFSRSADAPAYQQGQNQLYNELNLGRREEYDVLDKRRGRDPEMGGKPRRKNPQEGLYNELQKDKMAEAYSEIGMKGERRRGKGHDGLYQGLSTATKDTYDALHMQALPPR

SEQ ID NO: 2033 - protein, 743 aa, Artificial Sequence
  source: /note="Description of Artificial Sequence: Synthetic Chimeric Antigen Receptor sequence"
VQIEYLAKQIVDNAIQQASGGGGSADAPAYQQGQNQLYNELNLGRREEYDVLDKRRGRDPEMGGKPRRKNPQEGLYNELQKDKMAEAYSEIGMKGERRRGKGHDGLYQGLSTATKDTYDALHMQALPPRRAEGRGSLLTCGDVEENPGPMAVPTQVLGLLLLWLTDARCDIQMTQSPSSLSASVGDRVTITCRASEDIYFNLVWYQQKPGKAPKLLIYDTNRLADGVPSRFSGSGSGTQYTLTISSLQPEDFATYYCQHYKNYPLTFGQGTKLEIKRSGGGGSGGGGSGGGGSRSEVQLVESGGGLVQPGGSLRLSCAASGFTLSNYGMHWIRQAPGKGLEWVSSISLNGGSTYYRDSVKGRFTISRDNAKSTLYLQMNSLRAEDTAVYYCAAQDAYTGGYFDYWGQGTLVTVSSMPCPAPPVAGPSVFLFPPKPKDTLMIARTPEVTCVVVDVSHEDPEVKFNWYVDGVEVHNAKTKPREEQYNSTYRVVSVLTVLHQDWLNGKEYKCKVSNKALPAPIEKTISKAKPCPAPPVAGPSVFLFPPKPKDTLMIARTPEVTCVVVDVSHEDPEVKFNWYVDGVEVHNAKTKPREEQYNSTYRVVSVLTVLHQDWLNGKEYKCKVSNKALPAPIEKTISKAKMALIVLGGVAGLLLFIGLGIFFMALIVLGGVAGLLLFIGLGIFFCVRCRHRRRSGGGGSSHIQIPPGLTELLQGYTVEVLRQQPPDLVEFAVEYFTRLREARA

SEQ ID NO: 2034 - protein, 493 aa, Artificial Sequence
  source: /note="Description of Artificial Sequence: Synthetic Chimeric Antigen Receptor sequence"
MALPVTALLLPLALLLHAARPEVQLVQSGAEVKKPGASVKMSCKASGYTFTSYFIHWVRQAPGQGLEWIGFINPYNDGSKYAQKFQGRATLTSDKSTSTVYMELSSLRSEDTAVYYCTRDDGYYGYAMDYWGQGTLVTVSSASGGGGSGGGGSGGGGSDIQMTQSPSSLSASVGDRVTLTCRATQELSGYLSWLQQKPGKAIKRLIYAASTLDSGVPSRFSGNRAGTDYTLTISSLQPEDFATYYCLQYAIYPYTFGQGTKLEIKRTRTTTPAPRPPTPAPTIASQPLSLRPEACRPAAGGAVHTRGLDFACDIYIWAPLAGTCGVLLLSLVITLYCKRGRKKLLYIFKQPFMRPVQTTQEEDGCSCRFPEEEEGGCELSARVKFSRSADAPAYKQGQNQLYNELNLGRREEYDVLDKRRGRDPEMGGKPRRKNPQEGLYNELQKDKMAEAYSEIGMKGERRRGKGHDGLYQGLSTATKDTYDALHMQALPPR

SEQ ID NO: 2035 - protein, 704 aa, Artificial Sequence
  source: /note="Description of Artificial Sequence: Synthetic Chimeric Antigen Receptor sequence"
MVSKGEELFTGVVPILVELDGDVNGHKFSVSGEGEGDATYGKLTLKFICTTGKLPVPWPTLVTTLTYGVQCFSRYPDHMKQHDFFKSAMPEGYVQERTIFFKDDGNYKTRAEVKFEGDTLVNRIELKGIDFKEDGNILGHKLEYNYNSHNVYIMADKQKNGIKVNFKIRHNIEDGSVQLADHYQQNTPIGDGPVLLPDNHYLSTQSALSKDPNEKRDHMVLLEFVTAAGITLGMDELYKSGVKQTLNFDLLKLAGDVESNPGPMALPVTALLLPLALLLHAARPEVKLVESGGGLVKPGGSLKLSCAASGFTFNSYTMSWVRQTPAKRLEWVVTISSGGGRTYYPDSVKGRFTISRDNARNTLYLQMSSLRSEDTAMYYCIRGDYRYDGFAYWGQGTVVTVSTGGGGSGGGGSGGGGSDIQMTQSPASLSASVGETVTITCRASENIDSYLAWYQQKQGKSPQLLVYASTLLVDGVPSRFSGSRSGTQFSLKINSLQSEDVARYYCQHYYSIPYTFGSGTKLEIKTTTPAPRPPTPAPTIASQPLSLRPEACRPAAGGAVHTRGLDFACDIYIWAPLAGTCGVLLLSLVITRVKFSRSADAPAYQQGQNQLYNELNLGRREEYDVLDKRRGRDPEMGGKPQRRKNPQEGLYNELQKDKMAEAYSEIGMKGERRRGKGHDGLYQGLSTATKDTYDALHMQALPPR

SEQ ID NO: 2036 - protein, 793 aa, Artificial Sequence
  source: /note="Description of Artificial Sequence: Synthetic Chimeric Antigen Receptor sequence"
MVSKGEELFTGVVPILVELDGDVNGHKFSVSGEGEGDATYGKLTLKFICTTGKLPVPWPTLVTTLTYGVQCFSRYPDHMKQHDFFKSAMPEGYVQERTIFFKDDGNYKTRAEVKFEGDTLVNRIELKGIDFKEDGNILGHKLEYNYNSHNVYIMADKQKNGIKVNFKIRHNIEDGSVQLADHYQQNTPIGDGPVLLPDNHYLSTQSALSKDPNEKRDHMVLLEFVTAAGITLGMDELYKSGVKQTLNFDLLKLAGDVESNPGPMALPVTALLLPLALLLHAARPEVKLVESGGGLVKPGGSLKLSCAASGFTFNSYTMSWVRQTPAKRLEWVVTISSGGGRTYYPDSVKGRFTISRDNARNTLYLQMSSLRSEDTAMYYCIRGDYRYDGFAYWGQGTVVTVSTGGGGSGGGGSGGGGSDIQMTQSPASLSASVGETVTITCRASENIDSYLAWYQQKQGKSPQLLVYASTLLVDGVPSRFSGSRSGTQFSLKINSLQSEDVARYYCQHYYSIPYTFGSGTKLEIKTTTPAPRPPTPAPTIASQPLSLRPEACRPAAGGAVHTRGLDFACDFWVLVVVGGVLACYSLLVTVAFIIFWVRSKRSRLLHSDYMNMTPRRPGPTRKHYQPYAPPRDFAAYRSKRGRKKLLYIFKQPFMRPVQTTQEEDGCSCRFPEEEEGGCELRVKFSRSADAPAYQQGQNQLYNELNLGRREEYDVLDKRRGRDPEMGGKPQRRKNPQEGLYNELQKDKMAEAYSEIGMKGERRRGKGHDGLYQGLSTATKDTYDALHMQALPPR

SEQ ID NO: 2037 - protein, 453 aa, Artificial Sequence
  source: /note="Description of Artificial Sequence: Synthetic Chimeric Antigen Receptor sequence"
MALPVTALLLPLALLLHAARPEVQLLESGGGLVQPGGSLRLSCAASGFTFSSYAMNWVRQAPGKGLEWVSAISDSGGSRWYADSVKGRFTISRDNSKNTLYLQMNSLRAEDTAVYYCTRYWPMDIWGQGTLVTVSSGGGGSGGGGSGGGGSEIVLTQSPGTLSLSPGERATLSCRASVRVSSTYLAWYQQKPGQAPRLLMYDASIRATGIPDRFSGSGSGTDFTLTISRLEPEDFAVYYCQQYMKWPLTFGQGTKVEIKGLAVSTISSFFPPGYQIYIWAPLAGTCGVLLLSLVITLYCKRGRKKLLYIFKQPFMRPVQTTQEEDGCSCRFPEEEEGGCELRVKFSRSADAPAYQQGQNQLYNELNLGRREEYDVLDKRRGRDPEMGGKPRRKNPQEGLYNELQKDKMAEAYSEIGMKGERRRGKGHDGLYQGLSTATKDTYDALHMQALPPR

SEQ ID NO: 2038 - protein, 455 aa, Artificial Sequence
  source: /note="Description of Artificial Sequence: Synthetic Chimeric Antigen Receptor sequence"
MALPVTALLLPLALLLHAARPQVQLQESGPGLVKPSETLSLTCVVSGGSISSSNWWSWVRQPPGKGLEWIGEIYHSGSPNYNPSLKSRVTISVDKSKNQFSLKLSSVTAADTAVYYCARQTTAGSFDYWGQGTLVTVSSGGGGSGGGGSGGGGSDIQMTQSPSSLSASVGDRVTITCRASQSISSYLNWYQQKPGKAPKLLIYAASSLQSGVPSRFSGSGSGTDFTLTISSLQPEDFATYYCQQSYSTPPTFGQGTKVEIKGLAVSTISSFFPPGYQIYIWAPLAGTCGVLLLSLVITLYCKRGRKKLLYIFKQPFMRPVQTTQEEDGCSCRFPEEEEGGCELRVKFSRSADAPAYQQGQNQLYNELNLGRREEYDVLDKRRGRDPEMGGKPRRKNPQEGLYNELQKDKMAEAYSEIGMKGERRRGKGHDGLYQGLSTATKDTYDALHMQALPPR

SEQ ID NO: 2039 - protein, 456 aa, Artificial Sequence
  source: /note="Description of Artificial Sequence: Synthetic Chimeric Antigen Receptor sequence"
MALPVTALLLPLALLLHAARPQVQLQQPGAELVKPGTSVKLSCKASGYTFTRYWMHWVKQRPGQGLEWIGMIHPSSGSTSYNEKVKNKATLTVDRSSTTAYMQLSSLTSEDSAVYYCARDGDYYYGTGDYWGQGTTLTVSSGGGGSGGGGSGGGGSQIVLSQSPAILSASPGEKVTMTCRASSSINYMHWYQQKPGSSPKPWIFATSNLASGVPSRFSGSGSGTSYSLTISRVEAEDAATYYCQQWRSDRALTFGAGTKLELGLAVSTISSFFPPGYQIYIWAPLAGTCGVLLLSLVITLYCKRGRKKLLYIFKQPFMRPVQTTQEEDGCSCRFPEEEEGGCELRVKFSRSADAPAYQQGQNQLYNELNLGRREEYDVLDKRRGRDPEMGGKPRRKNPQEGLYNELQKDKMAEAYSEIGMKGERRRGKGHDGLYQGLSTATKDTYDALHMQALPPR

SEQ ID NO: 2040 - protein, 457 aa, Artificial Sequence
  source: /note="Description of Artificial Sequence: Synthetic Chimeric Antigen Receptor sequence"
MALPVTALLLPLALLLHAARPEVQLQQSGAELVRPGASVKLSCTASGFNIKDDYIHWVKQRPEQGLEWIGWIDPEKGDTAYASKFQDKATITSDTSSNTAYLQLSSLTSEDTAVYYCTLTGRFDYWGQGTTLTVSSGGGGSGGGGSGGGGSDIVMSQSPSSLAVSVGEKVTMSCKSSQSLLYSSNQKNNLAWYQQKPGQSPKLLIYWASTRESGVPDRFTGSGSGTDFTLTISSVQAEDLAVYYCQQYYSYRTFGGGTKLEIKGLAVSTISSFFPPGYQIYIWAPLAGTCGVLLLSLVITLYCKRGRKKLLYIFKQPFMRPVQTTQEEDGCSCRFPEEEEGGCELRVKFSRSADAPAYQQGQNQLYNELNLGRREEYDVLDKRRGRDPEMGGKPRRKNPQEGLYNELQKDKMAEAYSEIGMKGERRRGKGHDGLYQGLSTATKDTYDALHMQALPPR

SEQ ID NO: 2041 - protein, 457 aa, Artificial Sequence
  source: /note="Description of Artificial Sequence: Synthetic Chimeric Antigen Receptor sequence"
MALPVTALLLPLALLLHAARPEVQLQQSGPELVKPGASVKMSCKASGYIFTSYVMYWVKQKPGQGLEWIGYINPYNDGTKYNEKFKGKATLTSDKSSSTAYMELSSLTSEDSAVYYSCCARYYDYDYYFDYWGQGTTLTVSSGGGGSGGGGSGGGGSDIQMTQSPSSLSASLGGKVTITCKASQDINKYIAWYQHKPGKGPRLLIHYTSTLQPGIPSRFSGSGSGRDYSFSISNLEPEDIATYYCLQYDYLWTFGGGTKLEIKGLAVSTISSFFPPGYQIYIWAPLAGTCGVLLLSLVITLYCKRGRKKLLYIFKQPFMRPVQTTQEEDGCSCRFPEEEEGGCELRVKFSRSADAPAYQQGQNQLYNELNLGRREEYDVLDKRRGRDPEMGGKPRRKNPQEGLYNELQKDKMAEAYSEIGMKGERRRGKGHDGLYQGLSTATKDTYDALHMQALPPR

SEQ ID NO: 2042 - protein, 458 aa, Artificial Sequence
  source: /note="Description of Artificial Sequence: Synthetic Chimeric Antigen Receptor sequence"
MALPVTALLLPLALLLHAARPEVQLQQSGPELVKPGASVKMSCKASGYTFTSYFIHWVKQKPGQGLEWIGFINPYNDGSKYNEKFKGKATLTSDKSSSTAYMELSSLTSEDSAVYYCTRDDGYYGYAMDYWGQGTSVTVSSGGGGSGGGGSGGGGSDIQMTQSPSSLSASLGERVSLTCRATQELSGYLSWLQQKPDGTIKRLIYAASTLDSGVPKRFSGNRSGSDYSLTISSLESEDFADYYCLQYAIYPYTFGGGTKLEIKRGLAVSTISSFFPPGYQIYIWAPLAGTCGVLLLSLVITLYCKRGRKKLLYIFKQPFMRPVQTTQEEDGCSCRFPEEEEGGCELRVKFSRSADAPAYQQGQNQLYNELNLGRREEYDVLDKRRGRDPEMGGKPRRKNPQEGLYNELQKDKMAEAYSEIGMKGERRRGKGHDGLYQGLSTATKDTYDALHMQALPPR

SEQ ID NO: 2043 - protein, 458 aa, Artificial Sequence
  source: /note="Description of Artificial Sequence: Synthetic Chimeric Antigen Receptor sequence"
MALPVTALLLPLALLLHAARPEVQLRQSGPELVKPGASVKMSCKASGYTFTSYFMHWVKQKPGQGLEWIGFINPYNDGTKYNEKFKGKATLTSDKSSSTAYMELNSLTSEDSAVYYCTRDDGYYDYAMDYWGQGTSVTVSSGGGGSGGGGSGGGGSDIQMTQSPSSLSASLGERVSLTCRASQEISVYLSWLQQKPDGTIKRLIYAASTLDSGVPERFSGSRSGSDYSLTISSLESEDFADYYCLQYASYPYTFGGGTKLEIKRGLAVSTISSFFPPGYQIYIWAPLAGTCGVLLLSLVITLYCKRGRKKLLYIFKQPFMRPVQTTQEEDGCSCRFPEEEEGGCELRVKFSRSADAPAYQQGQNQLYNELNLGRREEYDVLDKRRGRDPEMGGKPRRKNPQEGLYNELQKDKMAEAYSEIGMKGERRRGKGHDGLYQGLSTATKDTYDALHMQALPPR

SEQ ID NO: 2044 - protein, 458 aa, Artificial Sequence
  source: /note="Description of Artificial Sequence: Synthetic Chimeric Antigen Receptor sequence"
MALPVTALLLPLALLLHAARPQVQLQESGPGLVKPSETLSLTCVVSGGSISSSNWWSWVRQPPGKGLEWIGEIYHSGSPNYNPSLKSRVTISVDKSKNQFSLKLSSVTAADTAVYYCARQTTAGSFDYWGQGTLVTVSSGGGGSGGGGSGGGGSDIQMTQSPSSLSASVGDRVTITCRASQSISSYLNWYQQKPGKAPKLLIYAASSLQSGVPSRFSGSGSGTDFTLTISSLQPEDFATYYCQQSYSTPPTFGQGTKVEIKGLAVSTISSFFPPGYQIISFFLALTSTALLFLLFFLTLRFSVVKRGRKKLLYIFKQPFMRPVQTTQEEDGCSCRFPEEEEGGCELRVKFSRSADAPAYQQGQNQLYNELNLGRREEYDVLDKRRGRDPEMGGKPRRKNPQEGLYNELQKDKMAEAYSEIGMKGERRRGKGHDGLYQGLSTATKDTYDALHMQALPPR

SEQ ID NO: 2045 - protein, 458 aa, Artificial Sequence
  source: /note="Description of Artificial Sequence: Synthetic Chimeric Antigen Receptor sequence"
MALPVTALLLPLALLLHAARPQVQLQESGPGLVKPSETLSLTCVVSGGSISSSNWWSWVRQPPGKGLEWIGEIYHSGSPNYNPSLKSRVTISVDKSKNQFSLKLSSVTAADTAVYYCARSSSGGFFDYWGQGTLVTVSSGGGGSGGGGSGGGGSDIQMTQSPSSLSASVGDRVTITCRASQSISSYLNWYQQKPGKAPKLLIYAASSLQSGVPSRFSGSGSGTDFTLTISSLQPEDFATYYCQQSYSTPPTFGQGTKVEIKGLAVSTISSFFPPGYQIISFFLALTSTALLFLLFFLTLRFSVVKRGRKKLLYIFKQPFMRPVQTTQEEDGCSCRFPEEEEGGCELRVKFSRSADAPAYQQGQNQLYNELNLGRREEYDVLDKRRGRDPEMGGKPRRKNPQEGLYNELQKDKMAEAYSEIGMKGERRRGKGHDGLYQGLSTATKDTYDALHMQALPPR

SEQ ID NO: 2046 - protein, 459 aa, Artificial Sequence
  source: /note="Description of Artificial Sequence: Synthetic Chimeric Antigen Receptor sequence"
MALPVTALLLPLALLLHAARPEVQLQQSGPELVKPGASMKISCKASGYSFTGYTMNWVKQSHEKNLEWIGPINPYNDGTIYNPNFKGKATLTVDKASSTAYMELLSLTSDDPAVYYSCCARTDDYDDYTMDYWGQGTSVTVSSGGGGSGGGGSGGGGSEIQMTQTPSSLSASLGDRVTISCRASHDISNYLNWYQQKPDGTLKLLIYYTSRLHSGVPSRFSGSGSGTDYSLTISNLEQEDIATYFCQQGKTLLWTFGGGTKLEIKGLAVSTISSFFPPGYQIYIWAPLAGTCGVLLLSLVITLYCKRGRKKLLYIFKQPFMRPVQTTQEEDGCSCRFPEEEEGGCELRVKFSRSADAPAYQQGQNQLYNELNLGRREEYDVLDKRRGRDPEMGGKPRRKNPQEGLYNELQKDKMAEAYSEIGMKGERRRGKGHDGLYQGLSTATKDTYDALHMQALPPR

SEQ ID NO: 2047 - protein, 459 aa, Artificial Sequence
  source: /note="Description of Artificial Sequence: Synthetic Chimeric Antigen Receptor sequence"
MALPVTALLLPLALLLHAARPQVQLQQPGAELVKPGTSVKLSCKASGYTFTRYWMHWVKQRPGQGLEWIGMIHPSSGSTSYNEKVKNKATLTVDRSSTTAYMQLSSLTSEDSAVYYCARDGDYYYGTGDYWGQGTTLTVSSGGGGSGGGGSGGGGSQIVLSQSPAILSASPGEKVTMTCRASSSINYMHWYQQKPGSSPKPWIFATSNLASGVPSRFSGSGSGTSYSLTISRVEAEDAATYYCQQWRSDRALTFGAGTKLELGLAVSTISSFFPPGYQIISFFLALTSTALLFLLFFLTLRFSVVKRGRKKLLYIFKQPFMRPVQTTQEEDGCSCRFPEEEEGGCELRVKFSRSADAPAYQQGQNQLYNELNLGRREEYDVLDKRRGRDPEMGGKPRRKNPQEGLYNELQKDKMAEAYSEIGMKGERRRGKGHDGLYQGLSTATKDTYDALHMQALPPR

SEQ ID NO: 2048 - protein, 460 aa, Artificial Sequence
  source: /note="Description of Artificial Sequence: Synthetic Chimeric Antigen Receptor sequence"
MALPVTALLLPLALLLHAARPDIQLQESGPGLVKPSQSLSLTCSVTGYSITSAYYWNWIRQFPGNKLEWMGYISYDGRNNYNPSLKNRISITRDTSKNQFFLKLNSVTTEDTATYYCAKEGDYDVGNYYAMDYWGQGTSVTVSSGGGGSGGGGSGGGGSENVLTQSPAIMSASPGEKVTMTCRASSNVISSYVHWYQQRSGASPKLWIYSTSNLASGVPARFSGSGSGTSYSLTISSVEAEDAATYYCQQYSGYPLTFGAGTKLELGLAVSTISSFFPPGYQIYIWAPLAGTCGVLLLSLVITLYCKRGRKKLLYIFKQPFMRPVQTTQEEDGCSCRFPEEEEGGCELRVKFSRSADAPAYQQGQNQLYNELNLGRREEYDVLDKRRGRDPEMGGKPRRKNPQEGLYNELQKDKMAEAYSEIGMKGERRRGKGHDGLYQGLSTATKDTYDALHMQALPPR

SEQ ID NO: 2049 - protein, 460 aa, Artificial Sequence
  source: /note="Description of Artificial Sequence: Synthetic Chimeric Antigen Receptor sequence"
MALPVTALLLPLALLLHAARPEVQLQQSGAELVRPGASVKLSCTASGFNIKDDYIHWVKQRPEQGLEWIGWIDPEKGDTAYASKFQDKATITSDTSSNTAYLQLSSLTSEDTAVYYCTLTGRFDYWGQGTTLTVSSGGGGSGGGGSGGGGSDIVMSQSPSSLAVSVGEKVTMSCKSSQSLLYSSNQKNNLAWYQQKPGQSPKLLIYWASTRESGVPDRFTGSGSGTDFTLTISSVQAEDLAVYYCQQYYSYRTFGGGTKLEIKGLAVSTISSFFPPGYQIISFFLALTSTALLFLLFFLTLRFSVVKRGRKKLLYIFKQPFMRPVQTTQEEDGCSCRFPEEEEGGCELRVKFSRSADAPAYQQGQNQLYNELNLGRREEYDVLDKRRGRDPEMGGKPRRKNPQEGLYNELQKDKMAEAYSEIGMKGERRRGKGHDGLYQGLSTATKDTYDALHMQALPPR

SEQ ID NO: 2050 - protein, 460 aa, Artificial Sequence
  source: /note="Description of Artificial Sequence: Synthetic Chimeric Antigen Receptor sequence"
MALPVTALLLPLALLLHAARPEVQLQQSGPELVKPGASVKMSCKASGYIFTSYVMYWVKQKPGQGLEWIGYINPYNDGTKYNEKFKGKATLTSDKSSSTAYMELSSLTSEDSAVYYSCCARYYDYDYYFDYWGQGTTLTVSSGGGGSGGGGSGGGGSDIQMTQSPSSLSASLGGKVTITCKASQDINKYIAWYQHKPGKGPRLLIHYTSTLQPGIPSRFSGSGSGRDYSFSISNLEPEDIATYYCLQYDYLWTFGGGTKLEIKGLAVSTISSFFPPGYQIISFFLALTSTALLFLLFFLTLRFSVVKRGRKKLLYIFKQPFMRPVQTTQEEDGCSCRFPEEEEGGCELRVKFSRSADAPAYQQGQNQLYNELNLGRREEYDVLDKRRGRDPEMGGKPRRKNPQEGLYNELQKDKMAEAYSEIGMKGERRRGKGHDGLYQGLSTATKDTYDALHMQALPPR

SEQ ID NO: 2051 - protein, 461 aa, Artificial Sequence
  source: /note="Description of Artificial Sequence: Synthetic Chimeric Antigen Receptor sequence"
MALPVTALLLPLALLLHAARPEVQLQQSGPELVKPGASVKMSCKASGYTFTSYFIHWVKQKPGQGLEWIGFINPYNDGSKYNEKFKGKATLTSDKSSSTAYMELSSLTSEDSAVYYCTRDDGYYGYAMDYWGQGTSVTVSSGGGGSGGGGSGGGGSDIQMTQSPSSLSASLGERVSLTCRATQELSGYLSWLQQKPDGTIKRLIYAASTLDSGVPKRFSGNRSGSDYSLTISSLESEDFADYYCLQYAIYPYTFGGGTKLEIKRGLAVSTISSFFPPGYQIISFFLALTSTALLFLLFFLTLRFSVVKRGRKKLLYIFKQPFMRPVQTTQEEDGCSCRFPEEEEGGCELRVKFSRSADAPAYQQGQNQLYNELNLGRREEYDVLDKRRGRDPEMGGKPRRKNPQEGLYNELQKDKMAEAYSEIGMKGERRRGKGHDGLYQGLSTATKDTYDALHMQALPPR

SEQ ID NO: 2052 - protein, 461 aa, Artificial Sequence
  source: /note="Description of Artificial Sequence: Synthetic Chimeric Antigen Receptor sequence"
MALPVTALLLPLALLLHAARPEVQLRQSGPELVKPGASVKMSCKASGYTFTSYFMHWVKQKPGQGLEWIGFINPYNDGTKYNEKFKGKATLTSDKSSSTAYMELNSLTSEDSAVYYCTRDDGYYDYAMDYWGQGTSVTVSSGGGGSGGGGSGGGGSDIQMTQSPSSLSASLGERVSLTCRASQEISVYLSWLQQKPDGTIKRLIYAASTLDSGVPERFSGSRSGSDYSLTISSLESEDFADYYCLQYASYPYTFGGGTKLEIKRGLAVSTISSFFPPGYQIISFFLALTSTALLFLLFFLTLRFSVVKRGRKKLLYIFKQPFMRPVQTTQEEDGCSCRFPEEEEGGCELRVKFSRSADAPAYQQGQNQLYNELNLGRREEYDVLDKRRGRDPEMGGKPRRKNPQEGLYNELQKDKMAEAYSEIGMKGERRRGKGHDGLYQGLSTATKDTYDALHMQALPPR

SEQ ID NO: 2053 - protein, 461 aa, Artificial Sequence
  source: /note="Description of Artificial Sequence: Synthetic Chimeric Antigen Receptor sequence"
MALPVTALLLPLALLLHAARPQVQLQQPGAELVKPGASMKMSCKASGYTFPSSNIHWLKQTPGQGLEWIGVIYPGNGDTSYNQKFKDKATLTTDKSSSTAYMQLSSLTSEDSAIYFSCCARVYNWHFDVWGAGTTVTVSSGGGGSGGGGSGGGGSNIVLTQSPASLAVSLGQRATISCRASESVDGYGDIFMLWYQQKPGQPPKLLIYFASNLESGVPARFSGSGSRTDFTLTIDPVEADDAATYYCQQNNEDPYTFGGGTKLEIKRGLAVSTISSFFPPGYQIYIWAPLAGTCGVLLLSLVITLYCKRGRKKLLYIFKQPFMRPVQTTQEEDGCSCRFPEEEEGGCELRVKFSRSADAPAYQQGQNQLYNELNLGRREEYDVLDKRRGRDPEMGGKPRRKNPQEGLYNELQKDKMAEAYSEIGMKGERRRGKGHDGLYQGLSTATKDTYDALHMQALPPR

SEQ ID NO: 2054 - protein, 462 aa, Artificial Sequence
  source: /note="Description of Artificial Sequence: Synthetic Chimeric Antigen Receptor sequence"
MALPVTALLLPLALLLHAARPEVQLQQSGPELVKPGASMKISCKASGYSFTGYTMNWVKQSHEKNLEWIGPINPYNDGTIYNPNFKGKATLTVDKASSTAYMELLSLTSDDPAVYYSCCARTDDYDDYTMDYWGQGTSVTVSSGGGGSGGGGSGGGGSEIQMTQTPSSLSASLGDRVTISCRASHDISNYLNWYQQKPDGTLKLLIYYTSRLHSGVPSRFSGSGSGTDYSLTISNLEQEDIATYFCQQGKTLLWTFGGGTKLEIKGLAVSTISSFFPPGYQIISFFLALTSTALLFLLFFLTLRFSVVKRGRKKLLYIFKQPFMRPVQTTQEEDGCSCRFPEEEEGGCELRVKFSRSADAPAYQQGQNQLYNELNLGRREEYDVLDKRRGRDPEMGGKPRRKNPQEGLYNELQKDKMAEAYSEIGMKGERRRGKGHDGLYQGLSTATKDTYDALHMQALPPR

SEQ ID NO: 2055 - protein, 463 aa, Artificial Sequence
  source: /note="Description of Artificial Sequence: Synthetic Chimeric Antigen Receptor sequence"
MALPVTALLLPLALLLHAARPDIQLQESGPGLVKPSQSLSLTCSVTGYSITSAYYWNWIRQFPGNKLEWMGYISYDGRNNYNPSLKNRISITRDTSKNQFFLKLNSVTTEDTATYYCAKEGDYDVGNYYAMDYWGQGTSVTVSSGGGGSGGGGSGGGGSENVLTQSPAIMSASPGEKVTMTCRASSNVISSYVHWYQQRSGASPKLWIYSTSNLASGVPARFSGSGSGTSYSLTISSVEAEDAATYYCQQYSGYPLTFGAGTKLELGLAVSTISSFFPPGYQIISFFLALTSTALLFLLFFLTLRFSVVKRGRKKLLYIFKQPFMRPVQTTQEEDGCSCRFPEEEEGGCELRVKFSRSADAPAYQQGQNQLYNELNLGRREEYDVLDKRRGRDPEMGGKPRRKNPQEGLYNELQKDKMAEAYSEIGMKGERRRGKGHDGLYQGLSTATKDTYDALHMQALPPR

SEQ ID NO: 2056 - protein, 463 aa, Artificial Sequence
  source: /note="Description of Artificial Sequence: Synthetic Chimeric Antigen Receptor sequence"
MALPVTALLLPLALLLHAARPEVQLQQSGPELVKPGASVKMSCKASGYTFTSYVMHWVKQKPGQGLEWIGYINPYNDGTKYNEKFKGKATLTSDTSSSTAYMELNSLTSEDSAVYFSCCARPIYFDNDYFDYWGQGTTLKVSSGGGGSGGGGSGGGGSTIVLTQSPASLAVSLGQRATISCRASESVDSYGNSFMHWYQQKPGQPPKLLIYLASNLESGVPARFSGSGSRTDFTLTIDPVEADDAATYYCQQNNYDPWTFGGGTKLEIKGLAVSTISSFFPPGYQIYIWAPLAGTCGVLLLSLVITLYCKRGRKKLLYIFKQPFMRPVQTTQEEDGCSCRFPEEEEGGCELRVKFSRSADAPAYQQGQNQLYNELNLGRREEYDVLDKRRGRDPEMGGKPRRKNPQEGLYNELQKDKMAEAYSEIGMKGERRRGKGHDGLYQGLSTATKDTYDALHMQALPPR

SEQ ID NO: 2057 - protein, 464 aa, Artificial Sequence
  source: /note="Description of Artificial Sequence: Synthetic Chimeric Antigen Receptor sequence"
MALPVTALLLPLALLLHAARPQVQLQQPGAELVKPGASMKMSCKASGYTFPSSNIHWLKQTPGQGLEWIGVIYPGNGDTSYNQKFKDKATLTTDKSSSTAYMQLSSLTSEDSAIYFSCCARVYNWHFDVWGAGTTVTVSSGGGGSGGGGSGGGGSNIVLTQSPASLAVSLGQRATISCRASESVDGYGDIFMLWYQQKPGQPPKLLIYFASNLESGVPARFSGSGSRTDFTLTIDPVEADDAATYYCQQNNEDPYTFGGGTKLEIKRGLAVSTISSFFPPGYQIISFFLALTSTALLFLLFFLTLRFSVVKRGRKKLLYIFKQPFMRPVQTTQEEDGCSCRFPEEEEGGCELRVKFSRSADAPAYQQGQNQLYNELNLGRREEYDVLDKRRGRDPEMGGKPRRKNPQEGLYNELQKDKMAEAYSEIGMKGERRRGKGHDGLYQGLSTATKDTYDALHMQALPPR

SEQ ID NO: 2058 - protein, 464 aa, Artificial Sequence
  source: /note="Description of Artificial Sequence: Synthetic Chimeric Antigen Receptor sequence"
MALPVTALLLPLALLLHAARPQVQLQQPGAELVKPGASVKLSCKASGYTFTRYWMHWVKQRPGQGLEWIGNIDPSDTETHYNQQFKDKATLTVDKSSSTAYMQLSSLTSEDSAVYYCAIYYGNPSYYAMDYWGQGTSVTVSSGGGGSGGGGSGGGGSDIVMTQSPSSLTVTAGEKVTMSCKSSQNLLNSGNQKKYLNWYQQKPGQPPKLLIYWASTRESGVPDRFTGSGSGTDFTLTISSVQAEDLAVYFCQNDYSYPFTFGAGTKLELKGLAVSTISSFFPPGYQIYIWAPLAGTCGVLLLSLVITLYCKRGRKKLLYIFKQPFMRPVQTTQEEDGCSCRFPEEEEGGCELRVKFSRSADAPAYQQGQNQLYNELNLGRREEYDVLDKRRGRDPEMGGKPRRKNPQEGLYNELQKDKMAEAYSEIGMKGERRRGKGHDGLYQGLSTATKDTYDALHMQALPPR

SEQ ID NO: 2059 - protein, 466 aa, Artificial Sequence
  source: /note="Description of Artificial Sequence: Synthetic Chimeric Antigen Receptor sequence"
MALPVTALLLPLALLLHAARPEVQLQQSGPELVKPGASVKMSCKASGYTFTSYVMHWVKQKPGQGLEWIGYINPYNDGTKYNEKFKGKATLTSDTSSSTAYMELNSLTSEDSAVYFSCCARPIYFDNDYFDYWGQGTTLKVSSGGGGSGGGGSGGGGSTIVLTQSPASLAVSLGQRATISCRASESVDSYGNSFMHWYQQKPGQPPKLLIYLASNLESGVPARFSGSGSRTDFTLTIDPVEADDAATYYCQQNNYDPWTFGGGTKLEIKGLAVSTISSFFPPGYQIISFFLALTSTALLFLLFFLTLRFSVVKRGRKKLLYIFKQPFMRPVQTTQEEDGCSCRFPEEEEGGCELRVKFSRSADAPAYQQGQNQLYNELNLGRREEYDVLDKRRGRDPEMGGKPRRKNPQEGLYNELQKDKMAEAYSEIGMKGERRRGKGHDGLYQGLSTATKDTYDALHMQALPPR

SEQ ID NO: 2060 - protein, 467 aa, Artificial Sequence
  source: /note="Description of Artificial Sequence: Synthetic Chimeric Antigen Receptor sequence"
MALPVTALLLPLALLLHAARPQVQLQQPGAELVKPGASVKLSCKASGYTFTRYWMHWVKQRPGQGLEWIGNIDPSDTETHYNQQFKDKATLTVDKSSSTAYMQLSSLTSEDSAVYYCAIYYGNPSYYAMDYWGQGTSVTVSSGGGGSGGGGSGGGGSDIVMTQSPSSLTVTAGEKVTMSCKSSQNLLNSGNQKKYLNWYQQKPGQPPKLLIYWASTRESGVPDRFTGSGSGTDFTLTISSVQAEDLAVYFCQNDYSYPFTFGAGTKLELKGLAVSTISSFFPPGYQIISFFLALTSTALLFLLFFLTLRFSVVKRGRKKLLYIFKQPFMRPVQTTQEEDGCSCRFPEEEEGGCELRVKFSRSADAPAYQQGQNQLYNELNLGRREEYDVLDKRRGRDPEMGGKPRRKNPQEGLYNELQKDKMAEAYSEIGMKGERRRGKGHDGLYQGLSTATKDTYDALHMQALPPR

SEQ ID NO: 2061 - protein, 483 aa, Artificial Sequence
  source: /note="Description of Artificial Sequence: Synthetic Chimeric Antigen Receptor sequence"
MALPVTALLLPLALLLHAARPQVNLRESGGGLVQPGGSLRLSCAASGFTFSSYEMNWVRQAPGKGLEWVSYISSSGSTIYYADSVKGRFTISRDNAKNSLYLQMNSLRAEDTAVYYCAREALGSSWEWGQGTTVTVSSGGGGSGGGGSGGGGSDIQMTQSPSSLSASVGDRVTITCQASQDISNYLNWYQQKPGKAPKLLIYDASNLETGVPSRFSGSGSGTDFTFTISSLQPEDIATYYCQQYDNLPLTFGGGTKLEIKTTTPAPRPPTPAPTIASQPLSLRPEACRPAAGGAVHTRGLDFACDIYIWAPLAGTCGVLLLSLVITLYCKRGRKKLLYIFKQPFMRPVQTTQEEDGCSCRFPEEEEGGCELRVKFSRSADAPAYKQGQNQLYNELNLGRREEYDVLDKRRGRDPEMGGKPRRKNPQEGLYNELQKDKMAEAYSEIGMKGERRRGKGHDGLYQGLSTATKDTYDALHMQALPPR

SEQ ID NO: 2062 - protein, 483 aa, Artificial Sequence
  source: /note="Description of Artificial Sequence: Synthetic Chimeric Antigen Receptor sequence"
MALPVTALLLPLALLLHAARPQVQLVESGGGLVQPGGSLRLSCAASGFTFSSYWMSWVRQAPGKGLEWVANINEDGSAKFYVDSVKGRFTISRDNAKNSLYLQMNSLRAEDTAVYFCARDLRSGRYWGQGTLVTVSSGGGGSGGGGSGGGGSEIVLTQSPGTLSLSPGGRATLSCRASQSISGSFLAWYQQKPGQAPRLLIYGASSRATGIPDRFSGSGSGTDFTLTISRLEPEDFAVYYCQQYGSSPPTFGLGTKLEIKTTTPAPRPPTPAPTIASQPLSLRPEACRPAAGGAVHTRGLDFACDIYIWAPLAGTCGVLLLSLVITLYCKRGRKKLLYIFKQPFMRPVQTTQEEDGCSCRFPEEEEGGCELRVKFSRSADAPAYKQGQNQLYNELNLGRREEYDVLDKRRGRDPEMGGKPRRKNPQEGLYNELQKDKMAEAYSEIGMKGERRRGKGHDGLYQGLSTATKDTYDALHMQALPPR

SEQ ID NO: 2063 - protein, 484 aa, Artificial Sequence
  source: /note="Description of Artificial Sequence: Synthetic Chimeric Antigen Receptor sequence"
MALPVTALLLPLALLLHAARPQVQLQESGPGLVKPSETLSLTCVVSGGSISSSNWWSWVRQPPGKGLEWIGEIYHSGSPNYNPSLKSRVTISVDKSKNQFSLKLSSVTAADTAVYYCARQTTAGSFDYWGQGTLVTVSSGGGGSGGGGSGGGGSDIQMTQSPSSLSASVGDRVTITCRASQSISSYLNWYQQKPGKAPKLLIYAASSLQSGVPSRFSGSGSGTDFTLTISSLQPEDFATYYCQQSYSTPPTFGQGTKVEIKTTTPAPRPPTPAPTIASQPLSLRPEACRPAAGGAVHTRGLDFACDIYIWAPLAGTCGVLLLSLVITLYCKRGRKKLLYIFKQPFMRPVQTTQEEDGCSCRFPEEEEGGCELRVKFSRSADAPAYQQGQNQLYNELNLGRREEYDVLDKRRGRDPEMGGKPRRKNPQEGLYNELQKDKMAEAYSEIGMKGERRRGKGHDGLYQGLSTATKDTYDALHMQALPPR

SEQ ID NO: 2064 - protein, 484 aa, Artificial Sequence
  source: /note="Description of Artificial Sequence: Synthetic Chimeric Antigen Receptor sequence"
MALPVTALLLPLALLLHAARPQVQLQESGPGLVKPSETLSLTCVVSGGSISSSNWWSWVRQPPGKGLEWIGEIYHSGSPNYNPSLKSRVTISVDKSKNQFSLKLSSVTAADTAVYYCARSSSGGFFDYWGQGTLVTVSSGGGGSGGGGSGGGGSDIQMTQSPSSLSASVGDRVTITCRASQSISSYLNWYQQKPGKAPKLLIYAASSLQSGVPSRFSGSGSGTDFTLTISSLQPEDFATYYCQQSYSTPPTFGQGTKVEIKTTTPAPRPPTPAPTIASQPLSLRPEACRPAAGGAVHTRGLDFACDIYIWAPLAGTCGVLLLSLVITLYCKRGRKKLLYIFKQPFMRPVQTTQEEDGCSCRFPEEEEGGCELRVKFSRSADAPAYQQGQNQLYNELNLGRREEYDVLDKRRGRDPEMGGKPRRKNPQEGLYNELQKDKMAEAYSEIGMKGERRRGKGHDGLYQGLSTATKDTYDALHMQALPPR

SEQ ID NO: 2065 - protein, 485 aa, Artificial Sequence
  source: /note="Description of Artificial Sequence: Synthetic Chimeric Antigen Receptor sequence"
MALPVTALLLPLALLLHAARPQVQLQQPGAELVKPGTSVKLSCKASGYTFTRYWMHWVKQRPGQGLEWIGMIHPSSGSTSYNEKVKNKATLTVDRSSTTAYMQLSSLTSEDSAVYYCARDGDYYYGTGDYWGQGTTLTVSSGGGGSGGGGSGGGGSQIVLSQSPAILSASPGEKVTMTCRASSSINYMHWYQQKPGSSPKPWIFATSNLASGVPSRFSGSGSGTSYSLTISRVEAEDAATYYCQQWRSDRALTFGAGTKLELTTTPAPRPPTPAPTIASQPLSLRPEACRPAAGGAVHTRGLDFACDIYIWAPLAGTCGVLLLSLVITLYCKRGRKKLLYIFKQPFMRPVQTTQEEDGCSCRFPEEEEGGCELRVKFSRSADAPAYQQGQNQLYNELNLGRREEYDVLDKRRGRDPEMGGKPRRKNPQEGLYNELQKDKMAEAYSEIGMKGERRRGKGHDGLYQGLSTATKDTYDALHMQALPPR

SEQ ID NO: 2066 - protein, 486 aa, Artificial Sequence
  source: /note="Description of Artificial Sequence: Synthetic Chimeric Antigen Receptor sequence"
MALPVTALLLPLALLLHAARPEVQLQQSGAELVRPGASVKLSCTASGFNIKDDYIHWVKQRPEQGLEWIGWIDPEKGDTAYASKFQDKATITSDTSSNTAYLQLSSLTSEDTAVYYCTLTGRFDYWGQGTTLTVSSGGGGSGGGGSGGGGSDIVMSQSPSSLAVSVGEKVTMSCKSSQSLLYSSNQKNNLAWYQQKPGQSPKLLIYWASTRESGVPDRFTGSGSGTDFTLTISSVQAEDLAVYYCQQYYSYRTFGGGTKLEIKTTTPAPRPPTPAPTIASQPLSLRPEACRPAAGGAVHTRGLDFACDIYIWAPLAGTCGVLLLSLVITLYCKRGRKKLLYIFKQPFMRPVQTTQEEDGCSCRFPEEEEGGCELRVKFSRSADAPAYQQGQNQLYNELNLGRREEYDVLDKRRGRDPEMGGKPRRKNPQEGLYNELQKDKMAEAYSEIGMKGERRRGKGHDGLYQGLSTATKDTYDALHMQALPPR

SEQ ID NO: 2067 - protein, 486 aa, Artificial Sequence
  source: /note="Description of Artificial Sequence: Synthetic Chimeric Antigen Receptor sequence"
MALPVTALLLPLALLLHAARPEVQLQQSGPELVKPGASVKMSCKASGYIFTSYVMYWVKQKPGQGLEWIGYINPYNDGTKYNEKFKGKATLTSDKSSSTAYMELSSLTSEDSAVYYSCCARYYDYDYYFDYWGQGTTLTVSSGGGGSGGGGSGGGGSDIQMTQSPSSLSASLGGKVTITCKASQDINKYIAWYQHKPGKGPRLLIHYTSTLQPGIPSRFSGSGSGRDYSFSISNLEPEDIATYYCLQYDYLWTFGGGTKLEIKTTTPAPRPPTPAPTIASQPLSLRPEACRPAAGGAVHTRGLDFACDIYIWAPLAGTCGVLLLSLVITLYCKRGRKKLLYIFKQPFMRPVQTTQEEDGCSCRFPEEEEGGCELRVKFSRSADAPAYQQGQNQLYNELNLGRREEYDVLDKRRGRDPEMGGKPRRKNPQEGLYNELQKDKMAEAYSEIGMKGERRRGKGHDGLYQGLSTATKDTYDALHMQALPPR

SEQ ID NO: 2068 - protein, 487 aa, Artificial Sequence
  source: /note="Description of Artificial Sequence: Synthetic Chimeric Antigen Receptor sequence"
MALPVTALLLPLALLLHAARPEVQLQQSGPELVKPGASVKMSCKASGYTFTSYFIHWVKQKPGQGLEWIGFINPYNDGSKYNEKFKGKATLTSDKSSSTAYMELSSLTSEDSAVYYCTRDDGYYGYAMDYWGQGTSVTVSSGGGGSGGGGSGGGGSDIQMTQSPSSLSASLGERVSLTCRATQELSGYLSWLQQKPDGTIKRLIYAASTLDSGVPKRFSGNRSGSDYSLTISSLESEDFADYYCLQYAIYPYTFGGGTKLEIKRTTTPAPRPPTPAPTIASQPLSLRPEACRPAAGGAVHTRGLDFACDIYIWAPLAGTCGVLLLSLVITLYCKRGRKKLLYIFKQPFMRPVQTTQEEDGCSCRFPEEEEGGCELRVKFSRSADAPAYQQGQNQLYNELNLGRREEYDVLDKRRGRDPEMGGKPRRKNPQEGLYNELQKDKMAEAYSEIGMKGERRRGKGHDGLYQGLSTATKDTYDALHMQALPPR

SEQ ID NO: 2069 - protein, 487 aa, Artificial Sequence
  source: /note="Description of Artificial Sequence: Synthetic Chimeric Antigen Receptor sequence"
MALPVTALLLPLALLLHAARPEVQLRQSGPELVKPGASVKMSCKASGYTFTSYFMHWVKQKPGQGLEWIGFINPYNDGTKYNEKFKGKATLTSDKSSSTAYMELNSLTSEDSAVYYCTRDDGYYDYAMDYWGQGTSVTVSSGGGGSGGGGSGGGGSDIQMTQSPSSLSASLGERVSLTCRASQEISVYLSWLQQKPDGTIKRLIYAASTLDSGVPERFSGSRSGSDYSLTISSLESEDFADYYCLQYASYPYTFGGGTKLEIKRTTTPAPRPPTPAPTIASQPLSLRPEACRPAAGGAVHTRGLDFACDIYIWAPLAGTCGVLLLSLVITLYCKRGRKKLLYIFKQPFMRPVQTTQEEDGCSCRFPEEEEGGCELRVKFSRSADAPAYQQGQNQLYNELNLGRREEYDVLDKRRGRDPEMGGKPRRKNPQEGLYNELQKDKMAEAYSEIGMKGERRRGKGHDGLYQGLSTATKDTYDALHMQALPPR

SEQ ID NO: 2070 - protein, 487 aa, Artificial Sequence
  source: /note="Description of Artificial Sequence: Synthetic Chimeric Antigen Receptor sequence"
MALPVTALLLPLALLLHAARPQVQLQESGPGLVKPSETLSLTCVVSGGSISSSNWWSWVRQPPGKGLEWIGEIYHSGSPNYNPSLKSRVTISVDKSKNQFSLKLSSVTAADTAVYYCARQTTAGSFDYWGQGTLVTVSSGGGGSGGGGSGGGGSDIQMTQSPSSLSASVGDRVTITCRASQSISSYLNWYQQKPGKAPKLLIYAASSLQSGVPSRFSGSGSGTDFTLTISSLQPEDFATYYCQQSYSTPPTFGQGTKVEIKTTTPAPRPPTPAPTIASQPLSLRPEACRPAAGGAVHTRGLDFACDIISFFLALTSTALLFLLFFLTLRFSVVKRGRKKLLYIFKQPFMRPVQTTQEEDGCSCRFPEEEEGGCELRVKFSRSADAPAYQQGQNQLYNELNLGRREEYDVLDKRRGRDPEMGGKPRRKNPQEGLYNELQKDKMAEAYSEIGMKGERRRGKGHDGLYQGLSTATKDTYDALHMQALPPR

SEQ ID NO: 2071 - protein, 487 aa, Artificial Sequence
  source: /note="Description of Artificial Sequence: Synthetic Chimeric Antigen Receptor sequence"
MALPVTALLLPLALLLHAARPQVQLQESGPGLVKPSETLSLTCVVSGGSISSSNWWSWVRQPPGKGLEWIGEIYHSGSPNYNPSLKSRVTISVDKSKNQFSLKLSSVTAADTAVYYCARSSSGGFFDYWGQGTLVTVSSGGGGSGGGGSGGGGSDIQMTQSPSSLSASVGDRVTITCRASQSISSYLNWYQQKPGKAPKLLIYAASSLQSGVPSRFSGSGSGTDFTLTISSLQPEDFATYYCQQSYSTPPTFGQGTKVEIKTTTPAPRPPTPAPTIASQPLSLRPEACRPAAGGAVHTRGLDFACDIISFFLALTSTALLFLLFFLTLRFSVVKRGRKKLLYIFKQPFMRPVQTTQEEDGCSCRFPEEEEGGCELRVKFSRSADAPAYQQGQNQLYNELNLGRREEYDVLDKRRGRDPEMGGKPRRKNPQEGLYNELQKDKMAEAYSEIGMKGERRRGKGHDGLYQGLSTATKDTYDALHMQALPPR

SEQ ID NO: 2072 - protein, 488 aa, Artificial Sequence
  source: /note="Description of Artificial Sequence: Synthetic Chimeric Antigen Receptor sequence"
MALPVTALLLPLALLLHAARPEVQLQQSGPELVKPGASMKISCKASGYSFTGYTMNWVKQSHEKNLEWIGPINPYNDGTIYNPNFKGKATLTVDKASSTAYMELLSLTSDDPAVYYSCCARTDDYDDYTMDYWGQGTSVTVSSGGGGSGGGGSGGGGSEIQMTQTPSSLSASLGDRVTISCRASHDISNYLNWYQQKPDGTLKLLIYYTSRLHSGVPSRFSGSGSGTDYSLTISNLEQEDIATYFCQQGKTLLWTFGGGTKLEIKTTTPAPRPPTPAPTIASQPLSLRPEACRPAAGGAVHTRGLDFACDIYIWAPLAGTCGVLLLSLVITLYCKRGRKKLLYIFKQPFMRPVQTTQEEDGCSCRFPEEEEGGCELRVKFSRSADAPAYQQGQNQLYNELNLGRREEYDVLDKRRGRDPEMGGKPRRKNPQEGLYNELQKDKMAEAYSEIGMKGERRRGKGHDGLYQGLSTATKDTYDALHMQALPPR

SEQ ID NO: 2073 - protein, 488 aa, Artificial Sequence
  source: /note="Description of Artificial Sequence: Synthetic Chimeric Antigen Receptor sequence"
MALPVTALLLPLALLLHAARPQVQLQQPGAELVKPGTSVKLSCKASGYTFTRYWMHWVKQRPGQGLEWIGMIHPSSGSTSYNEKVKNKATLTVDRSSTTAYMQLSSLTSEDSAVYYCARDGDYYYGTGDYWGQGTTLTVSSGGGGSGGGGSGGGGSQIVLSQSPAILSASPGEKVTMTCRASSSINYMHWYQQKPGSSPKPWIFATSNLASGVPSRFSGSGSGTSYSLTISRVEAEDAATYYCQQWRSDRALTFGAGTKLELTTTPAPRPPTPAPTIASQPLSLRPEACRPAAGGAVHTRGLDFACDIISFFLALTSTALLFLLFFLTLRFSVVKRGRKKLLYIFKQPFMRPVQTTQEEDGCSCRFPEEEEGGCELRVKFSRSADAPAYQQGQNQLYNELNLGRREEYDVLDKRRGRDPEMGGKPRRKNPQEGLYNELQKDKMAEAYSEIGMKGERRRGKGHDGLYQGLSTATKDTYDALHMQALPPR

SEQ ID NO: 2074 - protein, 489 aa, Artificial Sequence
  source: /note="Description of Artificial Sequence: Synthetic Chimeric Antigen Receptor sequence"
MALPVTALLLPLALLLHAARPDIQLQESGPGLVKPSQSLSLTCSVTGYSITSAYYWNWIRQFPGNKLEWMGYISYDGRNNYNPSLKNRISITRDTSKNQFFLKLNSVTTEDTATYYCAKEGDYDVGNYYAMDYWGQGTSVTVSSGGGGSGGGGSGGGGSENVLTQSPAIMSASPGEKVTMTCRASSNVISSYVHWYQQRSGASPKLWIYSTSNLASGVPARFSGSGSGTSYSLTISSVEAEDAATYYCQQYSGYPLTFGAGTKLELTTTPAPRPPTPAPTIASQPLSLRPEACRPAAGGAVHTRGLDFACDIYIWAPLAGTCGVLLLSLVITLYCKRGRKKLLYIFKQPFMRPVQTTQEEDGCSCRFPEEEEGGCELRVKFSRSADAPAYQQGQNQLYNELNLGRREEYDVLDKRRGRDPEMGGKPRRKNPQEGLYNELQKDKMAEAYSEIGMKGERRRGKGHDGLYQGLSTATKDTYDALHMQALPPR

SEQ ID NO: 2075 - protein, 489 aa, Artificial Sequence
  source: /note="Description of Artificial Sequence: Synthetic Chimeric Antigen Receptor sequence"
MALPVTALLLPLALLLHAARPEVQLQQSGAELVRPGASVKLSCTASGFNIKDDYIHWVKQRPEQGLEWIGWIDPEKGDTAYASKFQDKATITSDTSSNTAYLQLSSLTSEDTAVYYCTLTGRFDYWGQGTTLTVSSGGGGSGGGGSGGGGSDIVMSQSPSSLAVSVGEKVTMSCKSSQSLLYSSNQKNNLAWYQQKPGQSPKLLIYWASTRESGVPDRFTGSGSGTDFTLTISSVQAEDLAVYYCQQYYSYRTFGGGTKLEIKTTTPAPRPPTPAPTIASQPLSLRPEACRPAAGGAVHTRGLDFACDIISFFLALTSTALLFLLFFLTLRFSVVKRGRKKLLYIFKQPFMRPVQTTQEEDGCSCRFPEEEEGGCELRVKFSRSADAPAYQQGQNQLYNELNLGRREEYDVLDKRRGRDPEMGGKPRRKNPQEGLYNELQKDKMAEAYSEIGMKGERRRGKGHDGLYQGLSTATKDTYDALHMQALPPR

SEQ ID NO: 2076 - protein, 489 aa, Artificial Sequence
  source: /note="Description of Artificial Sequence: Synthetic Chimeric Antigen Receptor sequence"
MALPVTALLLPLALLLHAARPEVQLQQSGPELVKPGASVKMSCKASGYIFTSYVMYWVKQKPGQGLEWIGYINPYNDGTKYNEKFKGKATLTSDKSSSTAYMELSSLTSEDSAVYYSCCARYYDYDYYFDYWGQGTTLTVSSGGGGSGGGGSGGGGSDIQMTQSPSSLSASLGGKVTITCKASQDINKYIAWYQHKPGKGPRLLIHYTSTLQPGIPSRFSGSGSGRDYSFSISNLEPEDIATYYCLQYDYLWTFGGGTKLEIKTTTPAPRPPTPAPTIASQPLSLRPEACRPAAGGAVHTRGLDFACDIISFFLALTSTALLFLLFFLTLRFSVVKRGRKKLLYIFKQPFMRPVQTTQEEDGCSCRFPEEEEGGCELRVKFSRSADAPAYQQGQNQLYNELNLGRREEYDVLDKRRGRDPEMGGKPRRKNPQEGLYNELQKDKMAEAYSEIGMKGERRRGKGHDGLYQGLSTATKDTYDALHMQALPPR

SEQ ID NO: 2077 - protein, 489 aa, Artificial Sequence
  source: /note="Description of Artificial Sequence: Synthetic Chimeric Antigen Receptor sequence"
MALPVTALLLPLALLLHAARPEVQLQQSGPGLVRPSETLSLTCTVSGGPVRSGSHYWNWIRQPPGRGLEWIGYIYYSGSTNYNPSLENRVTISIDTSNNHFSLKLSSVTAADTALYFCARGTATFDWNFPFDSWGQGTLVTVSSGGGGSGGGGSGSGGSDIQMTQSPSSLSASIGDRVTITCRASQSISSYLNWYQQKPGKAPKLLIYAASSLQSGVPSRFSGSGSGTDFTLTISSLQPEDFATYYCQQSYSTPWTFGQGTKLEIKTTTPAPRPPTPAPTIASQPLSLRPEACRPAAGGAVHTRGLDFACDIYIWAPLAGTCGVLLLSLVITLYCKRGRKKLLYIFKQPFMRPVQTTQEEDGCSCRFPEEEEGGCELRVKFSRSADAPAYKQGQNQLYNELNLGRREEYDVLDKRRGRDPEMGGKPRRKNPQEGLYNELQKDKMAEAYSEIGMKGERRRGKGHDGLYQGLSTATKDTYDALHMQALPPR

SEQ ID NO: 2078 - protein, 489 aa, Artificial Sequence
  source: /note="Description of Artificial Sequence: Synthetic Chimeric Antigen Receptor sequence"
MALPVTALLLPLALLLHAARPEVQLVESGGGLVQPGGSLRLSCAASGFTFSSYEMNWVRQAPGKGLEWVSYISSSGSTIYYADSVKGRFTISRDNAKNSLYLQMNSLRAEDTAVYYCARDPYSSSWHDAFDIWGQGTMVTVSSGGGGSGGGGSGGGGSEIVLTQSPGTLSLSPGERATLSCRASQSVSSSYLAWYQQKPGQAPRLLIYGASSRATGIPDRFSGSGSGTDFTLTISRLEPEDFAVYYCQQYGSSPLTFGGGTKVDIKTTTPAPRPPTPAPTIASQPLSLRPEACRPAAGGAVHTRGLDFACDIYIWAPLAGTCGVLLLSLVITLYCKRGRKKLLYIFKQPFMRPVQTTQEEDGCSCRFPEEEEGGCELRVKFSRSADAPAYKQGQNQLYNELNLGRREEYDVLDKRRGRDPEMGGKPRRKNPQEGLYNELQKDKMAEAYSEIGMKGERRRGKGHDGLYQGLSTATKDTYDALHMQALPPR

SEQ ID NO: 2079 - protein, 489 aa, Artificial Sequence
  source: /note="Description of Artificial Sequence: Synthetic Chimeric Antigen Receptor sequence"
MALPVTALLLPLALLLHAARPEVQLVESGGGVVQPGGSLRLSCAASGFTFDDYAMHWVRQAPGKGLEWVSLISGDGGSTYYADSVKGRFTISRDNSKNTLYLQMNSLRVEDTAVYYCARVFDSYYMDVWGKGTTVTVSSGGGGSGGGGSGSGGSEIVLTQSPLSLPVTPGQPASISCRSSQSLVYTDGNTYLNWFQQRPGQSPRRLIYKVSNRDSGVPDRFSGSGSDTDFTLKISRVEAEDVGIYYCMQGTHWSFTFGQGTRLEIKTTTPAPRPPTPAPTIASQPLSLRPEACRPAAGGAVHTRGLDFACDIYIWAPLAGTCGVLLLSLVITLYCKRGRKKLLYIFKQPFMRPVQTTQEEDGCSCRFPEEEEGGCELRVKFSRSADAPAYKQGQNQLYNELNLGRREEYDVLDKRRGRDPEMGGKPRRKNPQEGLYNELQKDKMAEAYSEIGMKGERRRGKGHDGLYQGLSTATKDTYDALHMQALPPR

SEQ ID NO: 2080 - protein, 490 aa, Artificial Sequence
  source: /note="Description of Artificial Sequence: Synthetic Chimeric Antigen Receptor sequence"
MALPVTALLLPLALLLHAARPEVQLQQSGPELVKPGASVKMSCKASGYTFTSYFIHWVKQKPGQGLEWIGFINPYNDGSKYNEKFKGKATLTSDKSSSTAYMELSSLTSEDSAVYYCTRDDGYYGYAMDYWGQGTSVTVSSGGGGSGGGGSGGGGSDIQMTQSPSSLSASLGERVSLTCRATQELSGYLSWLQQKPDGTIKRLIYAASTLDSGVPKRFSGNRSGSDYSLTISSLESEDFADYYCLQYAIYPYTFGGGTKLEIKRTTTPAPRPPTPAPTIASQPLSLRPEACRPAAGGAVHTRGLDFACDIISFFLALTSTALLFLLFFLTLRFSVVKRGRKKLLYIFKQPFMRPVQTTQEEDGCSCRFPEEEEGGCELRVKFSRSADAPAYQQGQNQLYNELNLGRREEYDVLDKRRGRDPEMGGKPRRKNPQEGLYNELQKDKMAEAYSEIGMKGERRRGKGHDGLYQGLSTATKDTYDALHMQALPPR

SEQ ID NO: 2081 - protein, 490 aa, Artificial Sequence
  source: /note="Description of Artificial Sequence: Synthetic Chimeric Antigen Receptor sequence"
MALPVTALLLPLALLLHAARPEVQLRQSGPELVKPGASVKMSCKASGYTFTSYFMHWVKQKPGQGLEWIGFINPYNDGTKYNEKFKGKATLTSDKSSSTAYMELNSLTSEDSAVYYCTRDDGYYDYAMDYWGQGTSVTVSSGGGGSGGGGSGGGGSDIQMTQSPSSLSASLGERVSLTCRASQEISVYLSWLQQKPDGTIKRLIYAASTLDSGVPERFSGSRSGSDYSLTISSLESEDFADYYCLQYASYPYTFGGGTKLEIKRTTTPAPRPPTPAPTIASQPLSLRPEACRPAAGGAVHTRGLDFACDIISFFLALTSTALLFLLFFLTLRFSVVKRGRKKLLYIFKQPFMRPVQTTQEEDGCSCRFPEEEEGGCELRVKFSRSADAPAYQQGQNQLYNELNLGRREEYDVLDKRRGRDPEMGGKPRRKNPQEGLYNELQKDKMAEAYSEIGMKGERRRGKGHDGLYQGLSTATKDTYDALHMQALPPR

SEQ ID NO: 2082 - protein, 490 aa, Artificial Sequence
  source: /note="Description of Artificial Sequence: Synthetic Chimeric Antigen Receptor sequence"
MALPVTALLLPLALLLHAARPEVQLVQSGGGVVRSGRSLRLSCAASGFTFNSYGLHWVRQAPGKGLEWVALIEYDGSNKYYGDSVKGRFTISRDKSKSTLYLQMDNLRAEDTAVYYCAREGNEDLAFDIWGQGTLVTVSSGGGGSGGGGSGGGGSGGGGSEIVLTQSPSSLSASVGDRVTITCQASQFIKKNLNWYQHKPGKAPKLLIYDASSLQTGVPSRFSGNRSGTTFSFTISSLQPEDVATYYCQQHDNLPLTFGGGTKVEIKTTTPAPRPPTPAPTIASQPLSLRPEACRPAAGGAVHTRGLDFACDIYIWAPLAGTCGVLLLSLVITLYCKRGRKKLLYIFKQPFMRPVQTTQEEDGCSCRFPEEEEGGCELRVKFSRSADAPAYKQGQNQLYNELNLGRREEYDVLDKRRGRDPEMGGKPRRKNPQEGLYNELQKDKMAEAYSEIGMKGERRRGKGHDGLYQGLSTATKDTYDALHMQALPPR

SEQ ID NO: 2083 - protein, 490 aa, Artificial Sequence
  source: /note="Description of Artificial Sequence: Synthetic Chimeric Antigen Receptor sequence"
MALPVTALLLPLALLLHAARPQVQLQQPGAELVKPGASMKMSCKASGYTFPSSNIHWLKQTPGQGLEWIGVIYPGNGDTSYNQKFKDKATLTTDKSSSTAYMQLSSLTSEDSAIYFSCCARVYNWHFDVWGAGTTVTVSSGGGGSGGGGSGGGGSNIVLTQSPASLAVSLGQRATISCRASESVDGYGDIFMLWYQQKPGQPPKLLIYFASNLESGVPARFSGSGSRTDFTLTIDPVEADDAATYYCQQNNEDPYTFGGGTKLEIKRTTTPAPRPPTPAPTIASQPLSLRPEACRPAAGGAVHTRGLDFACDIYIWAPLAGTCGVLLLSLVITLYCKRGRKKLLYIFKQPFMRPVQTTQEEDGCSCRFPEEEEGGCELRVKFSRSADAPAYQQGQNQLYNELNLGRREEYDVLDKRRGRDPEMGGKPRRKNPQEGLYNELQKDKMAEAYSEIGMKGERRRGKGHDGLYQGLSTATKDTYDALHMQALPPR

SEQ ID NO: 2084 - protein, 490 aa, Artificial Sequence
  source: /note="Description of Artificial Sequence: Synthetic Chimeric Antigen Receptor sequence"
MALPVTALLLPLALLLHAARPQVQLVQSGAEVKEPGASVKVSCKAPANTFSDHVMHWVRQAPGQRFEWMGYIHAANGGTHYSQKFQDRVTITRDTSANTVYMDLSSLRSEDTAVYYCARGGYNSDAFDIWGQGTMVTVSSGGGGSGGGGSGGGGSGGGGSDIVMTQSPSSVSASVGDRVTITCRASQDISSWLAWYQQKPGKAPKLLIYAASSLQSGVPSRFNGSGSGTDFTLTISSLQPEDFATYYCQQSYSTPLTFGGGTKVEIKTTTPAPRPPTPAPTIASQPLSLRPEACRPAAGGAVHTRGLDFACDIYIWAPLAGTCGVLLLSLVITLYCKRGRKKLLYIFKQPFMRPVQTTQEEDGCSCRFPEEEEGGCELRVKFSRSADAPAYKQGQNQLYNELNLGRREEYDVLDKRRGRDPEMGGKPRRKNPQEGLYNELQKDKMAEAYSEIGMKGERRRGKGHDGLYQGLSTATKDTYDALHMQALPPR

SEQ ID NO: 2085 - protein, 491 aa, Artificial Sequence
  source: /note="Description of Artificial Sequence: Synthetic Chimeric Antigen Receptor sequence"
MALPVTALLLPLALLLHAARPEVQLQQSGAEVKKPGSSVKVSCKASGGTFSSYAISWVRQAPGQGLEWMGGIIPIFGTANYAQKFQGRVTITADESTSTAYMELSSLRSEDTAVYYCARDLEMATIMGGYWGQGTLVTVSSGGGGSGGGGSGGGGSQSALTQPASVSGSPGQSITISCTGTSSDVGGYNYVSWYQQHPGKAPKLMIYDVSNRPSGVSNRFSGSKSGNTASLTISGLQAEDEADYYCSSYTSSSTLDVVFGGGTKLTVLTTTPAPRPPTPAPTIASQPLSLRPEACRPAAGGAVHTRGLDFACDIYIWAPLAGTCGVLLLSLVITLYCKRGRKKLLYIFKQPFMRPVQTTQEEDGCSCRFPEEEEGGCELRVKFSRSADAPAYKQGQNQLYNELNLGRREEYDVLDKRRGRDPEMGGKPRRKNPQEGLYNELQKDKMAEAYSEIGMKGERRRGKGHDGLYQGLSTATKDTYDALHMQALPPR

SEQ ID NO: 2086 - protein, 491 aa, Artificial Sequence
  source: /note="Description of Artificial Sequence: Synthetic Chimeric Antigen Receptor sequence"
MALPVTALLLPLALLLHAARPEVQLQQSGPELVKPGASMKISCKASGYSFTGYTMNWVKQSHEKNLEWIGPINPYNDGTIYNPNFKGKATLTVDKASSTAYMELLSLTSDDPAVYYSCCARTDDYDDYTMDYWGQGTSVTVSSGGGGSGGGGSGGGGSEIQMTQTPSSLSASLGDRVTISCRASHDISNYLNWYQQKPDGTLKLLIYYTSRLHSGVPSRFSGSGSGTDYSLTISNLEQEDIATYFCQQGKTLLWTFGGGTKLEIKTTTPAPRPPTPAPTIASQPLSLRPEACRPAAGGAVHTRGLDFACDIISFFLALTSTALLFLLFFLTLRFSVVKRGRKKLLYIFKQPFMRPVQTTQEEDGCSCRFPEEEEGGCELRVKFSRSADAPAYQQGQNQLYNELNLGRREEYDVLDKRRGRDPEMGGKPRRKNPQEGLYNELQKDKMAEAYSEIGMKGERRRGKGHDGLYQGLSTATKDTYDALHMQALPPR

SEQ ID NO: 2087 - protein, 491 aa, Artificial Sequence
  source: /note="Description of Artificial Sequence: Synthetic Chimeric Antigen Receptor sequence"
MALPVTALLLPLALLLHAARPQVQLQESGPGLVKPSETLSLTCTVSGGSISSSSYYWGWIRQPPGKGLEWIGSIYYSGSTYYNPSLKSRVSISVDTSKNQFSLKLKYVTAADTAVYYCATPGTYYDFLSGYYPFYWGQGTLVTVSSGGGGSGGGGSGGGGSDIVMTQSPSSLSASVGDRVTITCRASQGISSYLAWYQQKPGKAPKLLIYAASTLQSGVPSRFSGSGSGTDFTLTISSLQPEDFATYYCQQLNSYPYTFGQGTKLEIKTTTPAPRPPTPAPTIASQPLSLRPEACRPAAGGAVHTRGLDFACDIYIWAPLAGTCGVLLLSLVITLYCKRGRKKLLYIFKQPFMRPVQTTQEEDGCSCRFPEEEEGGCELRVKFSRSADAPAYKQGQNQLYNELNLGRREEYDVLDKRRGRDPEMGGKPRRKNPQEGLYNELQKDKMAEAYSEIGMKGERRRGKGHDGLYQGLSTATKDTYDALHMQALPPR

SEQ ID NO: 2088 - protein, 491 aa, Artificial Sequence
  source: /note="Description of Artificial Sequence: Synthetic Chimeric Antigen Receptor sequence"
MALPVTALLLPLALLLHAARPQVQLVQSGAEVKKSGASVKVSCKASGYPFTGYYIQWVRQAPGQGLEWMGWIDPNSGNTGYAQKFQGRVTMTRNTSISTAYMELSSLRSEDTAVYYCASDSYGYYYGMDVWGQGTLVTVSSGGGGSGGGGSGGGGSGGGGSDIQMTQSPSSLSASVGDRVTFTCRASQGISSALAWYQQKPGKPPKLLIYDASSLESGVPSRFSGSGSGTDFTLTISSLQPEDFATYYCQQFNNYPLTFGGGTKVEIKTTTPAPRPPTPAPTIASQPLSLRPEACRPAAGGAVHTRGLDFACDIYIWAPLAGTCGVLLLSLVITLYCKRGRKKLLYIFKQPFMRPVQTTQEEDGCSCRFPEEEEGGCELRVKFSRSADAPAYKQGQNQLYNELNLGRREEYDVLDKRRGRDPEMGGKPRRKNPQEGLYNELQKDKMAEAYSEIGMKGERRRGKGHDGLYQGLSTATKDTYDALHMQALPPR

SEQ ID NO: 2089 - protein, 492 aa, Artificial Sequence
  source: /note="Description of Artificial Sequence: Synthetic Chimeric Antigen Receptor sequence"
MALPVTALLLPLALLLHAARPDIQLQESGPGLVKPSQSLSLTCSVTGYSITSAYYWNWIRQFPGNKLEWMGYISYDGRNNYNPSLKNRISITRDTSKNQFFLKLNSVTTEDTATYYCAKEGDYDVGNYYAMDYWGQGTSVTVSSGGGGSGGGGSGGGGSENVLTQSPAIMSASPGEKVTMTCRASSNVISSYVHWYQQRSGASPKLWIYSTSNLASGVPARFSGSGSGTSYSLTISSVEAEDAATYYCQQYSGYPLTFGAGTKLELTTTPAPRPPTPAPTIASQPLSLRPEACRPAAGGAVHTRGLDFACDIISFFLALTSTALLFLLFFLTLRFSVVKRGRKKLLYIFKQPFMRPVQTTQEEDGCSCRFPEEEEGGCELRVKFSRSADAPAYQQGQNQLYNELNLGRREEYDVLDKRRGRDPEMGGKPRRKNPQEGLYNELQKDKMAEAYSEIGMKGERRRGKGHDGLYQGLSTATKDTYDALHMQALPPR

SEQ ID NO: 2090 - protein, 492 aa, Artificial Sequence
  source: /note="Description of Artificial Sequence: Synthetic Chimeric Antigen Receptor sequence"
MALPVTALLLPLALLLHAARPEVQLQQSGPELVKPGASVKMSCKASGYTFTSYVMHWVKQKPGQGLEWIGYINPYNDGTKYNEKFKGKATLTSDTSSSTAYMELNSLTSEDSAVYFSCCARPIYFDNDYFDYWGQGTTLKVSSGGGGSGGGGSGGGGSTIVLTQSPASLAVSLGQRATISCRASESVDSYGNSFMHWYQQKPGQPPKLLIYLASNLESGVPARFSGSGSRTDFTLTIDPVEADDAATYYCQQNNYDPWTFGGGTKLEIKTTTPAPRPPTPAPTIASQPLSLRPEACRPAAGGAVHTRGLDFACDIYIWAPLAGTCGVLLLSLVITLYCKRGRKKLLYIFKQPFMRPVQTTQEEDGCSCRFPEEEEGGCELRVKFSRSADAPAYQQGQNQLYNELNLGRREEYDVLDKRRGRDPEMGGKPRRKNPQEGLYNELQKDKMAEAYSEIGMKGERRRGKGHDGLYQGLSTATKDTYDALHMQALPPR

SEQ ID NO: 2091 - protein, 492 aa, Artificial Sequence
  source: /note="Description of Artificial Sequence: Synthetic Chimeric Antigen Receptor sequence"
MALPVTALLLPLALLLHAARPQVQLVQSGGGLVQPGGSLRLSCAASGFTFSSYSMNWVRQAPGKGLEWVSYISSSSSTIYYADSVKGRFTISRDNAKNSLYLQMNSLRAEDTAVYYCARDLSVRAIDAFDIWGQGTMVTVSSGGGGSGGGGSGGGGSGGGGSDIVLTQSPSSLSASVGDRVTITCQASQDISNYLNWYQQKPGKAPKLLIYDASNLETGVPSRFSGSGSGTDFTFTISSLQPEDFATYYCQQAYSTPFTFGPGTKVEIKTTTPAPRPPTPAPTIASQPLSLRPEACRPAAGGAVHTRGLDFACDIYIWAPLAGTCGVLLLSLVITLYCKRGRKKLLYIFKQPFMRPVQTTQEEDGCSCRFPEEEEGGCELRVKFSRSADAPAYKQGQNQLYNELNLGRREEYDVLDKRRGRDPEMGGKPRRKNPQEGLYNELQKDKMAEAYSEIGMKGERRRGKGHDGLYQGLSTATKDTYDALHMQALPPR

SEQ ID NO: 2092 - protein, 493 aa, Artificial Sequence
  source: /note="Description of Artificial Sequence: Synthetic Chimeric Antigen Receptor sequence"
MALPVTALLLPLALLLHAARPQVQLQESGAGLLKPSETLSLTCAVYGGSFSGYYWSWIRQPPGKGLEWVGEINHSGSTNYNPSLKSRVTISVDTSKNQFSLKLSSVTAADTAVYYCARGSGLVVYAIRVGSGWFDYWGQGTLVTVSSGGGGSGGGDSGGGGSDIQMTQSPSSLSASVGDRVTITCRASQSISSYLNWYQQKPGKAPKLLMYAASSLQSGVPSRFSGSGSGTDFTLTISSLQPEDFATYYCQQSYSTPPWTFGQGTKVDIKTTTPAPRPPTPAPTIASQPLSLRPEACRPAAGGAVHTRGLDFACDIYIWAPLAGTCGVLLLSLVITLYCKRGRKKLLYIFKQPFMRPVQTTQEEDGCSCRFPEEEEGGCELRVKFSRSADAPAYKQGQNQLYNELNLGRREEYDVLDKRRGRDPEMGGKPRRKNPQEGLYNELQKDKMAEAYSEIGMKGERRRGKGHDGLYQGLSTATKDTYDALHMQALPPR

SEQ ID NO: 2093 - protein, 493 aa, Artificial Sequence
  source: /note="Description of Artificial Sequence: Synthetic Chimeric Antigen Receptor sequence"
MALPVTALLLPLALLLHAARPQVQLQQPGAELVKPGASMKMSCKASGYTFPSSNIHWLKQTPGQGLEWIGVIYPGNGDTSYNQKFKDKATLTTDKSSSTAYMQLSSLTSEDSAIYFSCCARVYNWHFDVWGAGTTVTVSSGGGGSGGGGSGGGGSNIVLTQSPASLAVSLGQRATISCRASESVDGYGDIFMLWYQQKPGQPPKLLIYFASNLESGVPARFSGSGSRTDFTLTIDPVEADDAATYYCQQNNEDPYTFGGGTKLEIKRTTTPAPRPPTPAPTIASQPLSLRPEACRPAAGGAVHTRGLDFACDIISFFLALTSTALLFLLFFLTLRFSVVKRGRKKLLYIFKQPFMRPVQTTQEEDGCSCRFPEEEEGGCELRVKFSRSADAPAYQQGQNQLYNELNLGRREEYDVLDKRRGRDPEMGGKPRRKNPQEGLYNELQKDKMAEAYSEIGMKGERRRGKGHDGLYQGLSTATKDTYDALHMQALPPR

SEQ ID NO: 2094 - protein, 493 aa, Artificial Sequence
  source: /note="Description of Artificial Sequence: Synthetic Chimeric Antigen Receptor sequence"
MALPVTALLLPLALLLHAARPQVQLQQPGAELVKPGASVKLSCKASGYTFTRYWMHWVKQRPGQGLEWIGNIDPSDTETHYNQQFKDKATLTVDKSSSTAYMQLSSLTSEDSAVYYCAIYYGNPSYYAMDYWGQGTSVTVSSGGGGSGGGGSGGGGSDIVMTQSPSSLTVTAGEKVTMSCKSSQNLLNSGNQKKYLNWYQQKPGQPPKLLIYWASTRESGVPDRFTGSGSGTDFTLTISSVQAEDLAVYFCQNDYSYPFTFGAGTKLELKTTTPAPRPPTPAPTIASQPLSLRPEACRPAAGGAVHTRGLDFACDIYIWAPLAGTCGVLLLSLVITLYCKRGRKKLLYIFKQPFMRPVQTTQEEDGCSCRFPEEEEGGCELRVKFSRSADAPAYQQGQNQLYNELNLGRREEYDVLDKRRGRDPEMGGKPRRKNPQEGLYNELQKDKMAEAYSEIGMKGERRRGKGHDGLYQGLSTATKDTYDALHMQALPPR

SEQ ID NO: 2095 - protein, 495 aa, Artificial Sequence
  source: /note="Description of Artificial Sequence: Synthetic Chimeric Antigen Receptor sequence"
MALPVTALLLPLALLLHAARPEVQLQQSGPELVKPGASVKMSCKASGYTFTSYVMHWVKQKPGQGLEWIGYINPYNDGTKYNEKFKGKATLTSDTSSSTAYMELNSLTSEDSAVYFSCCARPIYFDNDYFDYWGQGTTLKVSSGGGGSGGGGSGGGGSTIVLTQSPASLAVSLGQRATISCRASESVDSYGNSFMHWYQQKPGQPPKLLIYLASNLESGVPARFSGSGSRTDFTLTIDPVEADDAATYYCQQNNYDPWTFGGGTKLEIKTTTPAPRPPTPAPTIASQPLSLRPEACRPAAGGAVHTRGLDFACDIISFFLALTSTALLFLLFFLTLRFSVVKRGRKKLLYIFKQPFMRPVQTTQEEDGCSCRFPEEEEGGCELRVKFSRSADAPAYQQGQNQLYNELNLGRREEYDVLDKRRGRDPEMGGKPRRKNPQEGLYNELQKDKMAEAYSEIGMKGERRRGKGHDGLYQGLSTATKDTYDALHMQALPPR

SEQ ID NO: 2096 - protein, 496 aa, Artificial Sequence
  source: /note="Description of Artificial Sequence: Synthetic Chimeric Antigen Receptor sequence"
MALPVTALLLPLALLLHAARPQVQLQQPGAELVKPGASVKLSCKASGYTFTRYWMHWVKQRPGQGLEWIGNIDPSDTETHYNQQFKDKATLTVDKSSSTAYMQLSSLTSEDSAVYYCAIYYGNPSYYAMDYWGQGTSVTVSSGGGGSGGGGSGGGGSDIVMTQSPSSLTVTAGEKVTMSCKSSQNLLNSGNQKKYLNWYQQKPGQPPKLLIYWASTRESGVPDRFTGSGSGTDFTLTISSVQAEDLAVYFCQNDYSYPFTFGAGTKLELKTTTPAPRPPTPAPTIASQPLSLRPEACRPAAGGAVHTRGLDFACDIISFFLALTSTALLFLLFFLTLRFSVVKRGRKKLLYIFKQPFMRPVQTTQEEDGCSCRFPEEEEGGCELRVKFSRSADAPAYQQGQNQLYNELNLGRREEYDVLDKRRGRDPEMGGKPRRKNPQEGLYNELQKDKMAEAYSEIGMKGERRRGKGHDGLYQGLSTATKDTYDALHMQALPPR

SEQ ID NO: 2097 - protein, 499 aa, Artificial Sequence
  source: /note="Description of Artificial Sequence: Synthetic Chimeric Antigen Receptor sequence"
MALPVTALLLPLALLLHAARPEVQLVESGGGLVKPGGSLRLSCAASGFTFSSYSMNWVRQAPGKGLEWVSSISSSSSYIYYADSVKGRFTISRDNAKNSLYLQMNSLRAEDTAVYYCARDPSSSGSYYMEDSYYYGMDVWGQGTTVTVSSGGGGSGGGGSGGGGSNFMLTQPHSVSESPGKTVTISCTGSSGSIASNYVQWYQQRPGSAPTTVIYEDNQRPSGVPDRFSGSIDSSSNSASLTISGLKTEDEADYYCQSYDSSNQVVFGGGTKLTVLTTTPAPRPPTPAPTIASQPLSLRPEACRPAAGGAVHTRGLDFACDIYIWAPLAGTCGVLLLSLVITLYCKRGRKKLLYIFKQPFMRPVQTTQEEDGCSCRFPEEEEGGCELRVKFSRSADAPAYKQGQNQLYNELNLGRREEYDVLDKRRGRDPEMGGKPRRKNPQEGLYNELQKDKMAEAYSEIGMKGERRRGKGHDGLYQGLSTATKDTYDALHMQALPPR

SEQ ID NO: 2098 - protein, 499 aa, Artificial Sequence
  source: /note="Description of Artificial Sequence: Synthetic Chimeric Antigen Receptor sequence"
MALPVTALLLPLALLLHAARPQVQLVESGGGLVQPGGSLRLSCAASGFNVSSNYMTWVRQAPGKGLEWVSVIYSGGATYYGDSVKGRFTVSRDNSKNTVYLQMNRLTAEDTAVYYCARDRLYCGNNCYLYYYYGMDVWGQGTLVTVSSGGGGSGGGGSGGGGSGGGGSDIQVTQSPSSLSASVGDRVTITCRASQSISSYLNWYQQKPGKAPKLLIYAASSLQSGVPSRFSGSGSGTDFTLTISSLQPEDFATYYCQQSYSTPPLTFGQGTKVEIKTTTPAPRPPTPAPTIASQPLSLRPEACRPAAGGAVHTRGLDFACDIYIWAPLAGTCGVLLLSLVITLYCKRGRKKLLYIFKQPFMRPVQTTQEEDGCSCRFPEEEEGGCELRVKFSRSADAPAYKQGQNQLYNELNLGRREEYDVLDKRRGRDPEMGGKPRRKNPQEGLYNELQKDKMAEAYSEIGMKGERRRGKGHDGLYQGLSTATKDTYDALHMQALPPR

SEQ ID NO: 2099 - protein, 670 aa, Artificial Sequence
  source: /note="Description of Artificial Sequence: Synthetic Chimeric Antigen Receptor sequence"
MALPVTALLLPLALLLHAARPQVQLQESGPGLVKPSETLSLTCVVSGGSISSSNWWSWVRQPPGKGLEWIGEIYHSGSPNYNPSLKSRVTISVDKSKNQFSLKLSSVTAADTAVYYCARQTTAGSFDYWGQGTLVTVSSGGGGSGGGGSGGGGSDIQMTQSPSSLSASVGDRVTITCRASQSISSYLNWYQQKPGKAPKLLIYAASSLQSGVPSRFSGSGSGTDFTLTISSLQPEDFATYYCQQSYSTPPTFGQGTKVEIKEPKSPDKTHTCPPCPAPPVAGPSVFLFPPKPKDTLMIARTPEVTCVVVDVSHEDPEVKFNWYVDGVEVHNAKTKPREEQYNSTYRVVSVLTVLHQDWLNGKEYKCKVSNKALPAPIEKTISKAKGQPREPQVYTLPPSRDELTKNQVSLTCLVKGFYPSDIAVEWESNGQPENNYKTTPPVLDSDGSFFLYSKLTVDKSRWQQGNVFSCSVMHEALHNHYTQKSLSLSPGKIYIWAPLAGTCGVLLLSLVITLYCKRGRKKLLYIFKQPFMRPVQTTQEEDGCSCRFPEEEEGGCELRVKFSRSADAPAYQQGQNQLYNELNLGRREEYDVLDKRRGRDPEMGGKPRRKNPQEGLYNELQKDKMAEAYSEIGMKGERRRGKGHDGLYQGLSTATKDTYDALHMQALPPR

SEQ ID NO: 2100 - protein, 670 aa, Artificial Sequence
  source: /note="Description of Artificial Sequence: Synthetic Chimeric Antigen Receptor sequence"
MALPVTALLLPLALLLHAARPQVQLQESGPGLVKPSETLSLTCVVSGGSISSSNWWSWVRQPPGKGLEWIGEIYHSGSPNYNPSLKSRVTISVDKSKNQFSLKLSSVTAADTAVYYCARSSSGGFFDYWGQGTLVTVSSGGGGSGGGGSGGGGSDIQMTQSPSSLSASVGDRVTITCRASQSISSYLNWYQQKPGKAPKLLIYAASSLQSGVPSRFSGSGSGTDFTLTISSLQPEDFATYYCQQSYSTPPTFGQGTKVEIKEPKSPDKTHTCPPCPAPPVAGPSVFLFPPKPKDTLMIARTPEVTCVVVDVSHEDPEVKFNWYVDGVEVHNAKTKPREEQYNSTYRVVSVLTVLHQDWLNGKEYKCKVSNKALPAPIEKTISKAKGQPREPQVYTLPPSRDELTKNQVSLTCLVKGFYPSDIAVEWESNGQPENNYKTTPPVLDSDGSFFLYSKLTVDKSRWQQGNVFSCSVMHEALHNHYTQKSLSLSPGKIYIWAPLAGTCGVLLLSLVITLYCKRGRKKLLYIFKQPFMRPVQTTQEEDGCSCRFPEEEEGGCELRVKFSRSADAPAYQQGQNQLYNELNLGRREEYDVLDKRRGRDPEMGGKPRRKNPQEGLYNELQKDKMAEAYSEIGMKGERRRGKGHDGLYQGLSTATKDTYDALHMQALPPR

SEQ ID NO: 2101 - protein, 671 aa, Artificial Sequence
  source: /note="Description of Artificial Sequence: Synthetic Chimeric Antigen Receptor sequence"
MALPVTALLLPLALLLHAARPQVQLQQPGAELVKPGTSVKLSCKASGYTFTRYWMHWVKQRPGQGLEWIGMIHPSSGSTSYNEKVKNKATLTVDRSSTTAYMQLSSLTSEDSAVYYCARDGDYYYGTGDYWGQGTTLTVSSGGGGSGGGGSGGGGSQIVLSQSPAILSASPGEKVTMTCRASSSINYMHWYQQKPGSSPKPWIFATSNLASGVPSRFSGSGSGTSYSLTISRVEAEDAATYYCQQWRSDRALTFGAGTKLELEPKSPDKTHTCPPCPAPPVAGPSVFLFPPKPKDTLMIARTPEVTCVVVDVSHEDPEVKFNWYVDGVEVHNAKTKPREEQYNSTYRVVSVLTVLHQDWLNGKEYKCKVSNKALPAPIEKTISKAKGQPREPQVYTLPPSRDELTKNQVSLTCLVKGFYPSDIAVEWESNGQPENNYKTTPPVLDSDGSFFLYSKLTVDKSRWQQGNVFSCSVMHEALHNHYTQKSLSLSPGKIYIWAPLAGTCGVLLLSLVITLYCKRGRKKLLYIFKQPFMRPVQTTQEEDGCSCRFPEEEEGGCELRVKFSRSADAPAYQQGQNQLYNELNLGRREEYDVLDKRRGRDPEMGGKPRRKNPQEGLYNELQKDKMAEAYSEIGMKGERRRGKGHDGLYQGLSTATKDTYDALHMQALPPR

SEQ ID NO: 2102 - protein, 672 aa, Artificial Sequence
  source: /note="Description of Artificial Sequence: Synthetic Chimeric Antigen Receptor sequence"
MALPVTALLLPLALLLHAARPEVQLQQSGAELVRPGASVKLSCTASGFNIKDDYIHWVKQRPEQGLEWIGWIDPEKGDTAYASKFQDKATITSDTSSNTAYLQLSSLTSEDTAVYYCTLTGRFDYWGQGTTLTVSSGGGGSGGGGSGGGGSDIVMSQSPSSLAVSVGEKVTMSCKSSQSLLYSSNQKNNLAWYQQKPGQSPKLLIYWASTRESGVPDRFTGSGSGTDFTLTISSVQAEDLAVYYCQQYYSYRTFGGGTKLEIKEPKSPDKTHTCPPCPAPPVAGPSVFLFPPKPKDTLMIARTPEVTCVVVDVSHEDPEVKFNWYVDGVEVHNAKTKPREEQYNSTYRVVSVLTVLHQDWLNGKEYKCKVSNKALPAPIEKTISKAKGQPREPQVYTLPPSRDELTKNQVSLTCLVKGFYPSDIAVEWESNGQPENNYKTTPPVLDSDGSFFLYSKLTVDKSRWQQGNVFSCSVMHEALHNHYTQKSLSLSPGKIYIWAPLAGTCGVLLLSLVITLYCKRGRKKLLYIFKQPFMRPVQTTQEEDGCSCRFPEEEEGGCELRVKFSRSADAPAYQQGQNQLYNELNLGRREEYDVLDKRRGRDPEMGGKPRRKNPQEGLYNELQKDKMAEAYSEIGMKGERRRGKGHDGLYQGLSTATKDTYDALHMQALPPR

SEQ ID NO: 2103 - protein, 672 aa, Artificial Sequence
  source: /note="Description of Artificial Sequence: Synthetic Chimeric Antigen Receptor sequence"
MALPVTALLLPLALLLHAARPEVQLQQSGPELVKPGASVKMSCKASGYIFTSYVMYWVKQKPGQGLEWIGYINPYNDGTKYNEKFKGKATLTSDKSSSTAYMELSSLTSEDSAVYYSCCARYYDYDYYFDYWGQGTTLTVSSGGGGSGGGGSGGGGSDIQMTQSPSSLSASLGGKVTITCKASQDINKYIAWYQHKPGKGPRLLIHYTSTLQPGIPSRFSGSGSGRDYSFSISNLEPEDIATYYCLQYDYLWTFGGGTKLEIKEPKSPDKTHTCPPCPAPPVAGPSVFLFPPKPKDTLMIARTPEVTCVVVDVSHEDPEVKFNWYVDGVEVHNAKTKPREEQYNSTYRVVSVLTVLHQDWLNGKEYKCKVSNKALPAPIEKTISKAKGQPREPQVYTLPPSRDELTKNQVSLTCLVKGFYPSDIAVEWESNGQPENNYKTTPPVLDSDGSFFLYSKLTVDKSRWQQGNVFSCSVMHEALHNHYTQKSLSLSPGKIYIWAPLAGTCGVLLLSLVITLYCKRGRKKLLYIFKQPFMRPVQTTQEEDGCSCRFPEEEEGGCELRVKFSRSADAPAYQQGQNQLYNELNLGRREEYDVLDKRRGRDPEMGGKPRRKNPQEGLYNELQKDKMAEAYSEIGMKGERRRGKGHDGLYQGLSTATKDTYDALHMQALPPR

SEQ ID NO: 2104 - protein, 673 aa, Artificial Sequence
  source: /note="Description of Artificial Sequence: Synthetic Chimeric Antigen Receptor sequence"
MALPVTALLLPLALLLHAARPEVQLQQSGPELVKPGASVKMSCKASGYTFTSYFIHWVKQKPGQGLEWIGFINPYNDGSKYNEKFKGKATLTSDKSSSTAYMELSSLTSEDSAVYYCTRDDGYYGYAMDYWGQGTSVTVSSGGGGSGGGGSGGGGSDIQMTQSPSSLSASLGERVSLTCRATQELSGYLSWLQQKPDGTIKRLIYAASTLDSGVPKRFSGNRSGSDYSLTISSLESEDFADYYCLQYAIYPYTFGGGTKLEIKREPKSPDKTHTCPPCPAPPVAGPSVFLFPPKPKDTLMIARTPEVTCVVVDVSHEDPEVKFNWYVDGVEVHNAKTKPREEQYNSTYRVVSVLTVLHQDWLNGKEYKCKVSNKALPAPIEKTISKAKGQPREPQVYTLPPSRDELTKNQVSLTCLVKGFYPSDIAVEWESNGQPENNYKTTPPVLDSDGSFFLYSKLTVDKSRWQQGNVFSCSVMHEALHNHYTQKSLSLSPGKIYIWAPLAGTCGVLLLSLVITLYCKRGRKKLLYIFKQPFMRPVQTTQEEDGCSCRFPEEEEGGCELRVKFSRSADAPAYQQGQNQLYNELNLGRREEYDVLDKRRGRDPEMGGKPRRKNPQEGLYNELQKDKMAEAYSEIGMKGERRRGKGHDGLYQGLSTATKDTYDALHMQALPPR

SEQ ID NO: 2105 - protein, 673 aa, Artificial Sequence
  source: /note="Description of Artificial Sequence: Synthetic Chimeric Antigen Receptor sequence"
MALPVTALLLPLALLLHAARPEVQLRQSGPELVKPGASVKMSCKASGYTFTSYFMHWVKQKPGQGLEWIGFINPYNDGTKYNEKFKGKATLTSDKSSSTAYMELNSLTSEDSAVYYCTRDDGYYDYAMDYWGQGTSVTVSSGGGGSGGGGSGGGGSDIQMTQSPSSLSASLGERVSLTCRASQEISVYLSWLQQKPDGTIKRLIYAASTLDSGVPERFSGSRSGSDYSLTISSLESEDFADYYCLQYASYPYTFGGGTKLEIKREPKSPDKTHTCPPCPAPPVAGPSVFLFPPKPKDTLMIARTPEVTCVVVDVSHEDPEVKFNWYVDGVEVHNAKTKPREEQYNSTYRVVSVLTVLHQDWLNGKEYKCKVSNKALPAPIEKTISKAKGQPREPQVYTLPPSRDELTKNQVSLTCLVKGFYPSDIAVEWESNGQPENNYKTTPPVLDSDGSFFLYSKLTVDKSRWQQGNVFSCSVMHEALHNHYTQKSLSLSPGKIYIWAPLAGTCGVLLLSLVITLYCKRGRKKLLYIFKQPFMRPVQTTQEEDGCSCRFPEEEEGGCELRVKFSRSADAPAYQQGQNQLYNELNLGRREEYDVLDKRRGRDPEMGGKPRRKNPQEGLYNELQKDKMAEAYSEIGMKGERRRGKGHDGLYQGLSTATKDTYDALHMQALPPR

SEQ ID NO: 2106 - protein, 673 aa, Artificial Sequence
  source: /note="Description of Artificial Sequence: Synthetic Chimeric Antigen Receptor sequence"
MALPVTALLLPLALLLHAARPQVQLQESGPGLVKPSETLSLTCVVSGGSISSSNWWSWVRQPPGKGLEWIGEIYHSGSPNYNPSLKSRVTISVDKSKNQFSLKLSSVTAADTAVYYCARQTTAGSFDYWGQGTLVTVSSGGGGSGGGGSGGGGSDIQMTQSPSSLSASVGDRVTITCRASQSISSYLNWYQQKPGKAPKLLIYAASSLQSGVPSRFSGSGSGTDFTLTISSLQPEDFATYYCQQSYSTPPTFGQGTKVEIKEPKSPDKTHTCPPCPAPPVAGPSVFLFPPKPKDTLMIARTPEVTCVVVDVSHEDPEVKFNWYVDGVEVHNAKTKPREEQYNSTYRVVSVLTVLHQDWLNGKEYKCKVSNKALPAPIEKTISKAKGQPREPQVYTLPPSRDELTKNQVSLTCLVKGFYPSDIAVEWESNGQPENNYKTTPPVLDSDGSFFLYSKLTVDKSRWQQGNVFSCSVMHEALHNHYTQKSLSLSPGKIISFFLALTSTALLFLLFFLTLRFSVVKRGRKKLLYIFKQPFMRPVQTTQEEDGCSCRFPEEEEGGCELRVKFSRSADAPAYQQGQNQLYNELNLGRREEYDVLDKRRGRDPEMGGKPRRKNPQEGLYNELQKDKMAEAYSEIGMKGERRRGKGHDGLYQGLSTATKDTYDALHMQALPPR

SEQ ID NO: 2107 - protein, 673 aa, Artificial Sequence
  source: /note="Description of Artificial Sequence: Synthetic Chimeric Antigen Receptor sequence"
MALPVTALLLPLALLLHAARPQVQLQESGPGLVKPSETLSLTCVVSGGSISSSNWWSWVRQPPGKGLEWIGEIYHSGSPNYNPSLKSRVTISVDKSKNQFSLKLSSVTAADTAVYYCARSSSGGFFDYWGQGTLVTVSSGGGGSGGGGSGGGGSDIQMTQSPSSLSASVGDRVTITCRASQSISSYLNWYQQKPGKAPKLLIYAASSLQSGVPSRFSGSGSGTDFTLTISSLQPEDFATYYCQQSYSTPPTFGQGTKVEIKEPKSPDKTHTCPPCPAPPVAGPSVFLFPPKPKDTLMIARTPEVTCVVVDVSHEDPEVKFNWYVDGVEVHNAKTKPREEQYNSTYRVVSVLTVLHQDWLNGKEYKCKVSNKALPAPIEKTISKAKGQPREPQVYTLPPSRDELTKNQVSLTCLVKGFYPSDIAVEWESNGQPENNYKTTPPVLDSDGSFFLYSKLTVDKSRWQQGNVFSCSVMHEALHNHYTQKSLSLSPGKIISFFLALTSTALLFLLFFLTLRFSVVKRGRKKLLYIFKQPFMRPVQTTQEEDGCSCRFPEEEEGGCELRVKFSRSADAPAYQQGQNQLYNELNLGRREEYDVLDKRRGRDPEMGGKPRRKNPQEGLYNELQKDKMAEAYSEIGMKGERRRGKGHDGLYQGLSTATKDTYDALHMQALPPR

SEQ ID NO: 2108 - protein, 674 aa, Artificial Sequence
  source: /note="Description of Artificial Sequence: Synthetic Chimeric Antigen Receptor sequence"
MALPVTALLLPLALLLHAARPEVQLQQSGPELVKPGASMKISCKASGYSFTGYTMNWVKQSHEKNLEWIGPINPYNDGTIYNPNFKGKATLTVDKASSTAYMELLSLTSDDPAVYYSCCARTDDYDDYTMDYWGQGTSVTVSSGGGGSGGGGSGGGGSEIQMTQTPSSLSASLGDRVTISCRASHDISNYLNWYQQKPDGTLKLLIYYTSRLHSGVPSRFSGSGSGTDYSLTISNLEQEDIATYFCQQGKTLLWTFGGGTKLEIKEPKSPDKTHTCPPCPAPPVAGPSVFLFPPKPKDTLMIARTPEVTCVVVDVSHEDPEVKFNWYVDGVEVHNAKTKPREEQYNSTYRVVSVLTVLHQDWLNGKEYKCKVSNKALPAPIEKTISKAKGQPREPQVYTLPPSRDELTKNQVSLTCLVKGFYPSDIAVEWESNGQPENNYKTTPPVLDSDGSFFLYSKLTVDKSRWQQGNVFSCSVMHEALHNHYTQKSLSLSPGKIYIWAPLAGTCGVLLLSLVITLYCKRGRKKLLYIFKQPFMRPVQTTQEEDGCSCRFPEEEEGGCELRVKFSRSADAPAYQQGQNQLYNELNLGRREEYDVLDKRRGRDPEMGGKPRRKNPQEGLYNELQKDKMAEAYSEIGMKGERRRGKGHDGLYQGLSTATKDTYDALHMQALPPR

SEQ ID NO: 2109 - protein, 674 aa, Artificial Sequence
  source: /note="Description of Artificial Sequence: Synthetic Chimeric Antigen Receptor sequence"
MALPVTALLLPLALLLHAARPQVQLQQPGAELVKPGTSVKLSCKASGYTFTRYWMHWVKQRPGQGLEWIGMIHPSSGSTSYNEKVKNKATLTVDRSSTTAYMQLSSLTSEDSAVYYCARDGDYYYGTGDYWGQGTTLTVSSGGGGSGGGGSGGGGSQIVLSQSPAILSASPGEKVTMTCRASSSINYMHWYQQKPGSSPKPWIFATSNLASGVPSRFSGSGSGTSYSLTISRVEAEDAATYYCQQWRSDRALTFGAGTKLELEPKSPDKTHTCPPCPAPPVAGPSVFLFPPKPKDTLMIARTPEVTCVVVDVSHEDPEVKFNWYVDGVEVHNAKTKPREEQYNSTYRVVSVLTVLHQDWLNGKEYKCKVSNKALPAPIEKTISKAKGQPREPQVYTLPPSRDELTKNQVSLTCLVKGFYPSDIAVEWESNGQPENNYKTTPPVLDSDGSFFLYSKLTVDKSRWQQGNVFSCSVMHEALHNHYTQKSLSLSPGKIISFFLALTSTALLFLLFFLTLRFSVVKRGRKKLLYIFKQPFMRPVQTTQEEDGCSCRFPEEEEGGCELRVKFSRSADAPAYQQGQNQLYNELNLGRREEYDVLDKRRGRDPEMGGKPRRKNPQEGLYNELQKDKMAEAYSEIGMKGERRRGKGHDGLYQGLSTATKDTYDALHMQALPPR

SEQ ID NO: 2110 - protein, 675 aa, Artificial Sequence
  source: /note="Description of Artificial Sequence: Synthetic Chimeric Antigen Receptor sequence"
MALPVTALLLPLALLLHAARPDIQLQESGPGLVKPSQSLSLTCSVTGYSITSAYYWNWIRQFPGNKLEWMGYISYDGRNNYNPSLKNRISITRDTSKNQFFLKLNSVTTEDTATYYCAKEGDYDVGNYYAMDYWGQGTSVTVSSGGGGSGGGGSGGGGSENVLTQSPAIMSASPGEKVTMTCRASSNVISSYVHWYQQRSGASPKLWIYSTSNLASGVPARFSGSGSGTSYSLTISSVEAEDAATYYCQQYSGYPLTFGAGTKLELEPKSPDKTHTCPPCPAPPVAGPSVFLFPPKPKDTLMIARTPEVTCVVVDVSHEDPEVKFNWYVDGVEVHNAKTKPREEQYNSTYRVVSVLTVLHQDWLNGKEYKCKVSNKALPAPIEKTISKAKGQPREPQVYTLPPSRDELTKNQVSLTCLVKGFYPSDIAVEWESNGQPENNYKTTPPVLDSDGSFFLYSKLTVDKSRWQQGNVFSCSVMHEALHNHYTQKSLSLSPGKIYIWAPLAGTCGVLLLSLVITLYCKRGRKKLLYIFKQPFMRPVQTTQEEDGCSCRFPEEEEGGCELRVKFSRSADAPAYQQGQNQLYNELNLGRREEYDVLDKRRGRDPEMGGKPRRKNPQEGLYNELQKDKMAEAYSEIGMKGERRRGKGHDGLYQGLSTATKDTYDALHMQALPPR

SEQ ID NO: 2111 - protein, 675 aa, Artificial Sequence
  source: /note="Description of Artificial Sequence: Synthetic Chimeric Antigen Receptor sequence"
MALPVTALLLPLALLLHAARPEVQLQQSGAELVRPGASVKLSCTASGFNIKDDYIHWVKQRPEQGLEWIGWIDPEKGDTAYASKFQDKATITSDTSSNTAYLQLSSLTSEDTAVYYCTLTGRFDYWGQGTTLTVSSGGGGSGGGGSGGGGSDIVMSQSPSSLAVSVGEKVTMSCKSSQSLLYSSNQKNNLAWYQQKPGQSPKLLIYWASTRESGVPDRFTGSGSGTDFTLTISSVQAEDLAVYYCQQYYSYRTFGGGTKLEIKEPKSPDKTHTCPPCPAPPVAGPSVFLFPPKPKDTLMIARTPEVTCVVVDVSHEDPEVKFNWYVDGVEVHNAKTKPREEQYNSTYRVVSVLTVLHQDWLNGKEYKCKVSNKALPAPIEKTISKAKGQPREPQVYTLPPSRDELTKNQVSLTCLVKGFYPSDIAVEWESNGQPENNYKTTPPVLDSDGSFFLYSKLTVDKSRWQQGNVFSCSVMHEALHNHYTQKSLSLSPGKIISFFLALTSTALLFLLFFLTLRFSVVKRGRKKLLYIFKQPFMRPVQTTQEEDGCSCRFPEEEEGGCELRVKFSRSADAPAYQQGQNQLYNELNLGRREEYDVLDKRRGRDPEMGGKPRRKNPQEGLYNELQKDKMAEAYSEIGMKGERRRGKGHDGLYQGLSTATKDTYDALHMQALPPR

SEQ ID NO: 2112 - protein, 675 aa, Artificial Sequence
  source: /note="Description of Artificial Sequence: Synthetic Chimeric Antigen Receptor sequence"
MALPVTALLLPLALLLHAARPEVQLQQSGPELVKPGASVKMSCKASGYIFTSYVMYWVKQKPGQGLEWIGYINPYNDGTKYNEKFKGKATLTSDKSSSTAYMELSSLTSEDSAVYYSCCARYYDYDYYFDYWGQGTTLTVSSGGGGSGGGGSGGGGSDIQMTQSPSSLSASLGGKVTITCKASQDINKYIAWYQHKPGKGPRLLIHYTSTLQPGIPSRFSGSGSGRDYSFSISNLEPEDIATYYCLQYDYLWTFGGGTKLEIKEPKSPDKTHTCPPCPAPPVAGPSVFLFPPKPKDTLMIARTPEVTCVVVDVSHEDPEVKFNWYVDGVEVHNAKTKPREEQYNSTYRVVSVLTVLHQDWLNGKEYKCKVSNKALPAPIEKTISKAKGQPREPQVYTLPPSRDELTKNQVSLTCLVKGFYPSDIAVEWESNGQPENNYKTTPPVLDSDGSFFLYSKLTVDKSRWQQGNVFSCSVMHEALHNHYTQKSLSLSPGKIISFFLALTSTALLFLLFFLTLRFSVVKRGRKKLLYIFKQPFMRPVQTTQEEDGCSCRFPEEEEGGCELRVKFSRSADAPAYQQGQNQLYNELNLGRREEYDVLDKRRGRDPEMGGKPRRKNPQEGLYNELQKDKMAEAYSEIGMKGERRRGKGHDGLYQGLSTATKDTYDALHMQALPPR

SEQ ID NO: 2113 - protein, 676 aa, Artificial Sequence
  source: /note="Description of Artificial Sequence: Synthetic Chimeric Antigen Receptor sequence"
MALPVTALLLPLALLLHAARPEVQLQQSGPELVKPGASVKMSCKASGYTFTSYFIHWVKQKPGQGLEWIGFINPYNDGSKYNEKFKGKATLTSDKSSSTAYMELSSLTSEDSAVYYCTRDDGYYGYAMDYWGQGTSVTVSSGGGGSGGGGSGGGGSDIQMTQSPSSLSASLGERVSLTCRATQELSGYLSWLQQKPDGTIKRLIYAASTLDSGVPKRFSGNRSGSDYSLTISSLESEDFADYYCLQYAIYPYTFGGGTKLEIKREPKSPDKTHTCPPCPAPPVAGPSVFLFPPKPKDTLMIARTPEVTCVVVDVSHEDPEVKFNWYVDGVEVHNAKTKPREEQYNSTYRVVSVLTVLHQDWLNGKEYKCKVSNKALPAPIEKTISKAKGQPREPQVYTLPPSRDELTKNQVSLTCLVKGFYPSDIAVEWESNGQPENNYKTTPPVLDSDGSFFLYSKLTVDKSRWQQGNVFSCSVMHEALHNHYTQKSLSLSPGKIISFFLALTSTALLFLLFFLTLRFSVVKRGRKKLLYIFKQPFMRPVQTTQEEDGCSCRFPEEEEGGCELRVKFSRSADAPAYQQGQNQLYNELNLGRREEYDVLDKRRGRDPEMGGKPRRKNPQEGLYNELQKDKMAEAYSEIGMKGERRRGKGHDGLYQGLSTATKDTYDALHMQALPPR

SEQ ID NO: 2114 - protein, 676 aa, Artificial Sequence
  source: /note="Description of Artificial Sequence: Synthetic Chimeric Antigen Receptor sequence"
MALPVTALLLPLALLLHAARPEVQLRQSGPELVKPGASVKMSCKASGYTFTSYFMHWVKQKPGQGLEWIGFINPYNDGTKYNEKFKGKATLTSDKSSSTAYMELNSLTSEDSAVYYCTRDDGYYDYAMDYWGQGTSVTVSSGGGGSGGGGSGGGGSDIQMTQSPSSLSASLGERVSLTCRASQEISVYLSWLQQKPDGTIKRLIYAASTLDSGVPERFSGSRSGSDYSLTISSLESEDFADYYCLQYASYPYTFGGGTKLEIKREPKSPDKTHTCPPCPAPPVAGPSVFLFPPKPKDTLMIARTPEVTCVVVDVSHEDPEVKFNWYVDGVEVHNAKTKPREEQYNSTYRVVSVLTVLHQDWLNGKEYKCKVSNKALPAPIEKTISKAKGQPREPQVYTLPPSRDELTKNQVSLTCLVKGFYPSDIAVEWESNGQPENNYKTTPPVLDSDGSFFLYSKLTVDKSRWQQGNVFSCSVMHEALHNHYTQKSLSLSPGKIISFFLALTSTALLFLLFFLTLRFSVVKRGRKKLLYIFKQPFMRPVQTTQEEDGCSCRFPEEEEGGCELRVKFSRSADAPAYQQGQNQLYNELNLGRREEYDVLDKRRGRDPEMGGKPRRKNPQEGLYNELQKDKMAEAYSEIGMKGERRRGKGHDGLYQGLSTATKDTYDALHMQALPPR

SEQ ID NO: 2115 - protein, 676 aa, Artificial Sequence
  source: /note="Description of Artificial Sequence: Synthetic Chimeric Antigen Receptor sequence"
MALPVTALLLPLALLLHAARPQVQLQQPGAELVKPGASMKMSCKASGYTFPSSNIHWLKQTPGQGLEWIGVIYPGNGDTSYNQKFKDKATLTTDKSSSTAYMQLSSLTSEDSAIYFSCCARVYNWHFDVWGAGTTVTVSSGGGGSGGGGSGGGGSNIVLTQSPASLAVSLGQRATISCRASESVDGYGDIFMLWYQQKPGQPPKLLIYFASNLESGVPARFSGSGSRTDFTLTIDPVEADDAATYYCQQNNEDPYTFGGGTKLEIKREPKSPDKTHTCPPCPAPPVAGPSVFLFPPKPKDTLMIARTPEVTCVVVDVSHEDPEVKFNWYVDGVEVHNAKTKPREEQYNSTYRVVSVLTVLHQDWLNGKEYKCKVSNKALPAPIEKTISKAKGQPREPQVYTLPPSRDELTKNQVSLTCLVKGFYPSDIAVEWESNGQPENNYKTTPPVLDSDGSFFLYSKLTVDKSRWQQGNVFSCSVMHEALHNHYTQKSLSLSPGKIYIWAPLAGTCGVLLLSLVITLYCKRGRKKLLYIFKQPFMRPVQTTQEEDGCSCRFPEEEEGGCELRVKFSRSADAPAYQQGQNQLYNELNLGRREEYDVLDKRRGRDPEMGGKPRRKNPQEGLYNELQKDKMAEAYSEIGMKGERRRGKGHDGLYQGLSTATKDTYDALHMQALPPR

SEQ ID NO: 2116 - protein, 677 aa, Artificial Sequence
  source: /note="Description of Artificial Sequence: Synthetic Chimeric Antigen Receptor sequence"
MALPVTALLLPLALLLHAARPEVQLQQSGPELVKPGASMKISCKASGYSFTGYTMNWVKQSHEKNLEWIGPINPYNDGTIYNPNFKGKATLTVDKASSTAYMELLSLTSDDPAVYYSCCARTDDYDDYTMDYWGQGTSVTVSSGGGGSGGGGSGGGGSEIQMTQTPSSLSASLGDRVTISCRASHDISNYLNWYQQKPDGTLKLLIYYTSRLHSGVPSRFSGSGSGTDYSLTISNLEQEDIATYFCQQGKTLLWTFGGGTKLEIKEPKSPDKTHTCPPCPAPPVAGPSVFLFPPKPKDTLMIARTPEVTCVVVDVSHEDPEVKFNWYVDGVEVHNAKTKPREEQYNSTYRVVSVLTVLHQDWLNGKEYKCKVSNKALPAPIEKTISKAKGQPREPQVYTLPPSRDELTKNQVSLTCLVKGFYPSDIAVEWESNGQPENNYKTTPPVLDSDGSFFLYSKLTVDKSRWQQGNVFSCSVMHEALHNHYTQKSLSLSPGKIISFFLALTSTALLFLLFFLTLRFSVVKRGRKKLLYIFKQPFMRPVQTTQEEDGCSCRFPEEEEGGCELRVKFSRSADAPAYQQGQNQLYNELNLGRREEYDVLDKRRGRDPEMGGKPRRKNPQEGLYNELQKDKMAEAYSEIGMKGERRRGKGHDGLYQGLSTATKDTYDALHMQALPPR

SEQ ID NO: 2117 - protein, 678 aa, Artificial Sequence
  source: /note="Description of Artificial Sequence: Synthetic Chimeric Antigen Receptor sequence"
MALPVTALLLPLALLLHAARPDIQLQESGPGLVKPSQSLSLTCSVTGYSITSAYYWNWIRQFPGNKLEWMGYISYDGRNNYNPSLKNRISITRDTSKNQFFLKLNSVTTEDTATYYCAKEGDYDVGNYYAMDYWGQGTSVTVSSGGGGSGGGGSGGGGSENVLTQSPAIMSASPGEKVTMTCRASSNVISSYVHWYQQRSGASPKLWIYSTSNLASGVPARFSGSGSGTSYSLTISSVEAEDAATYYCQQYSGYPLTFGAGTKLELEPKSPDKTHTCPPCPAPPVAGPSVFLFPPKPKDTLMIARTPEVTCVVVDVSHEDPEVKFNWYVDGVEVHNAKTKPREEQYNSTYRVVSVLTVLHQDWLNGKEYKCKVSNKALPAPIEKTISKAKGQPREPQVYTLPPSRDELTKNQVSLTCLVKGFYPSDIAVEWESNGQPENNYKTTPPVLDSDGSFFLYSKLTVDKSRWQQGNVFSCSVMHEALHNHYTQKSLSLSPGKIISFFLALTSTALLFLLFFLTLRFSVVKRGRKKLLYIFKQPFMRPVQTTQEEDGCSCRFPEEEEGGCELRVKFSRSADAPAYQQGQNQLYNELNLGRREEYDVLDKRRGRDPEMGGKPRRKNPQEGLYNELQKDKMAEAYSEIGMKGERRRGKGHDGLYQGLSTATKDTYDALHMQALPPR

SEQ ID NO: 2118 - protein, 678 aa, Artificial Sequence
  source: /note="Description of Artificial Sequence: Synthetic Chimeric Antigen Receptor sequence"
MALPVTALLLPLALLLHAARPEVQLQQSGPELVKPGASVKMSCKASGYTFTSYVMHWVKQKPGQGLEWIGYINPYNDGTKYNEKFKGKATLTSDTSSSTAYMELNSLTSEDSAVYFSCCARPIYFDNDYFDYWGQGTTLKVSSGGGGSGGGGSGGGGSTIVLTQSPASLAVSLGQRATISCRASESVDSYGNSFMHWYQQKPGQPPKLLIYLASNLESGVPARFSGSGSRTDFTLTIDPVEADDAATYYCQQNNYDPWTFGGGTKLEIKEPKSPDKTHTCPPCPAPPVAGPSVFLFPPKPKDTLMIARTPEVTCVVVDVSHEDPEVKFNWYVDGVEVHNAKTKPREEQYNSTYRVVSVLTVLHQDWLNGKEYKCKVSNKALPAPIEKTISKAKGQPREPQVYTLPPSRDELTKNQVSLTCLVKGFYPSDIAVEWESNGQPENNYKTTPPVLDSDGSFFLYSKLTVDKSRWQQGNVFSCSVMHEALHNHYTQKSLSLSPGKIYIWAPLAGTCGVLLLSLVITLYCKRGRKKLLYIFKQPFMRPVQTTQEEDGCSCRFPEEEEGGCELRVKFSRSADAPAYQQGQNQLYNELNLGRREEYDVLDKRRGRDPEMGGKPRRKNPQEGLYNELQKDKMAEAYSEIGMKGERRRGKGHDGLYQGLSTATKDTYDALHMQALPPR

SEQ ID NO: 2119 - protein, 679 aa, Artificial Sequence
  source: /note="Description of Artificial Sequence: Synthetic Chimeric Antigen Receptor sequence"
MALPVTALLLPLALLLHAARPQVQLQQPGAELVKPGASMKMSCKASGYTFPSSNIHWLKQTPGQGLEWIGVIYPGNGDTSYNQKFKDKATLTTDKSSSTAYMQLSSLTSEDSAIYFSCCARVYNWHFDVWGAGTTVTVSSGGGGSGGGGSGGGGSNIVLTQSPASLAVSLGQRATISCRASESVDGYGDIFMLWYQQKPGQPPKLLIYFASNLESGVPARFSGSGSRTDFTLTIDPVEADDAATYYCQQNNEDPYTFGGGTKLEIKREPKSPDKTHTCPPCPAPPVAGPSVFLFPPKPKDTLMIARTPEVTCVVVDVSHEDPEVKFNWYVDGVEVHNAKTKPREEQYNSTYRVVSVLTVLHQDWLNGKEYKCKVSNKALPAPIEKTISKAKGQPREPQVYTLPPSRDELTKNQVSLTCLVKGFYPSDIAVEWESNGQPENNYKTTPPVLDSDGSFFLYSKLTVDKSRWQQGNVFSCSVMHEALHNHYTQKSLSLSPGKIISFFLALTSTALLFLLFFLTLRFSVVKRGRKKLLYIFKQPFMRPVQTTQEEDGCSCRFPEEEEGGCELRVKFSRSADAPAYQQGQNQLYNELNLGRREEYDVLDKRRGRDPEMGGKPRRKNPQEGLYNELQKDKMAEAYSEIGMKGERRRGKGHDGLYQGLSTATKDTYDALHMQALPPR

SEQ ID NO: 2120 - protein, 679 aa, Artificial Sequence
  source: /note="Description of Artificial Sequence: Synthetic Chimeric Antigen Receptor sequence"
MALPVTALLLPLALLLHAARPQVQLQQPGAELVKPGASVKLSCKASGYTFTRYWMHWVKQRPGQGLEWIGNIDPSDTETHYNQQFKDKATLTVDKSSSTAYMQLSSLTSEDSAVYYCAIYYGNPSYYAMDYWGQGTSVTVSSGGGGSGGGGSGGGGSDIVMTQSPSSLTVTAGEKVTMSCKSSQNLLNSGNQKKYLNWYQQKPGQPPKLLIYWASTRESGVPDRFTGSGSGTDFTLTISSVQAEDLAVYFCQNDYSYPFTFGAGTKLELKEPKSPDKTHTCPPCPAPPVAGPSVFLFPPKPKDTLMIARTPEVTCVVVDVSHEDPEVKFNWYVDGVEVHNAKTKPREEQYNSTYRVVSVLTVLHQDWLNGKEYKCKVSNKALPAPIEKTISKAKGQPREPQVYTLPPSRDELTKNQVSLTCLVKGFYPSDIAVEWESNGQPENNYKTTPPVLDSDGSFFLYSKLTVDKSRWQQGNVFSCSVMHEALHNHYTQKSLSLSPGKIYIWAPLAGTCGVLLLSLVITLYCKRGRKKLLYIFKQPFMRPVQTTQEEDGCSCRFPEEEEGGCELRVKFSRSADAPAYQQGQNQLYNELNLGRREEYDVLDKRRGRDPEMGGKPRRKNPQEGLYNELQKDKMAEAYSEIGMKGERRRGKGHDGLYQGLSTATKDTYDALHMQALPPR

SEQ ID NO: 2121 - protein, 681 aa, Artificial Sequence
  source: /note="Description of Artificial Sequence: Synthetic Chimeric Antigen Receptor sequence"
MALPVTALLLPLALLLHAARPEVQLQQSGPELVKPGASVKMSCKASGYTFTSYVMHWVKQKPGQGLEWIGYINPYNDGTKYNEKFKGKATLTSDTSSSTAYMELNSLTSEDSAVYFSCCARPIYFDNDYFDYWGQGTTLKVSSGGGGSGGGGSGGGGSTIVLTQSPASLAVSLGQRATISCRASESVDSYGNSFMHWYQQKPGQPPKLLIYLASNLESGVPARFSGSGSRTDFTLTIDPVEADDAATYYCQQNNYDPWTFGGGTKLEIKEPKSPDKTHTCPPCPAPPVAGPSVFLFPPKPKDTLMIARTPEVTCVVVDVSHEDPEVKFNWYVDGVEVHNAKTKPREEQYNSTYRVVSVLTVLHQDWLNGKEYKCKVSNKALPAPIEKTISKAKGQPREPQVYTLPPSRDELTKNQVSLTCLVKGFYPSDIAVEWESNGQPENNYKTTPPVLDSDGSFFLYSKLTVDKSRWQQGNVFSCSVMHEALHNHYTQKSLSLSPGKIISFFLALTSTALLFLLFFLTLRFSVVKRGRKKLLYIFKQPFMRPVQTTQEEDGCSCRFPEEEEGGCELRVKFSRSADAPAYQQGQNQLYNELNLGRREEYDVLDKRRGRDPEMGGKPRRKNPQEGLYNELQKDKMAEAYSEIGMKGERRRGKGHDGLYQGLSTATKDTYDALHMQALPPR

SEQ ID NO: 2122 - protein, 682 aa, Artificial Sequence
  source: /note="Description of Artificial Sequence: Synthetic Chimeric Antigen Receptor sequence"
MALPVTALLLPLALLLHAARPQVQLQQPGAELVKPGASVKLSCKASGYTFTRYWMHWVKQRPGQGLEWIGNIDPSDTETHYNQQFKDKATLTVDKSSSTAYMQLSSLTSEDSAVYYCAIYYGNPSYYAMDYWGQGTSVTVSSGGGGSGGGGSGGGGSDIVMTQSPSSLTVTAGEKVTMSCKSSQNLLNSGNQKKYLNWYQQKPGQPPKLLIYWASTRESGVPDRFTGSGSGTDFTLTISSVQAEDLAVYFCQNDYSYPFTFGAGTKLELKEPKSPDKTHTCPPCPAPPVAGPSVFLFPPKPKDTLMIARTPEVTCVVVDVSHEDPEVKFNWYVDGVEVHNAKTKPREEQYNSTYRVVSVLTVLHQDWLNGKEYKCKVSNKALPAPIEKTISKAKGQPREPQVYTLPPSRDELTKNQVSLTCLVKGFYPSDIAVEWESNGQPENNYKTTPPVLDSDGSFFLYSKLTVDKSRWQQGNVFSCSVMHEALHNHYTQKSLSLSPGKIISFFLALTSTALLFLLFFLTLRFSVVKRGRKKLLYIFKQPFMRPVQTTQEEDGCSCRFPEEEEGGCELRVKFSRSADAPAYQQGQNQLYNELNLGRREEYDVLDKRRGRDPEMGGKPRRKNPQEGLYNELQKDKMAEAYSEIGMKGERRRGKGHDGLYQGLSTATKDTYDALHMQALPPR

SEQ ID NO: 2123 - protein, 535 aa, Artificial Sequence
  source: /note="Description of Artificial Sequence: Synthetic Chimeric Antigen Receptor sequence"
MALPVTALLLPLALLLHAARPGSEIQLQQSGAELVKPGASVKLSCTGSGFNIEDYYIHWVKQRTEQGLEWIGRIDPENDETKYGPIFQGRATITADTSSNTVYLQLSSLTSEDTAVYYCAFRGGVYWGPGTTLTVSSGGGGSGGGGSGGGGSHMDVVMTQSPLTLSVAIGQSASISCKSSQSLLDSDGKTYLNWLLQRPGQSPKRLISLVSKLDSGVPDRFTGSGSGTDFTLRISRVEAEDLGIYYCWQGTHFPGTFGGGTKLEIKASTTTPAPRPPTPAPTIASQPLSLRPEACRPAAGGAVHTRGLDFACDFWVLVVVGGVLACYSLLVTVAFIIFWVRSKRSRLLHSDYMNMTPRRPGPTRKHYQPYAPPRDFAAYRSKRGRKKLLYIFKQPFMRPVQTTQEEDGCSCRFPEEEEGGCELRVKFSRSADAPAYKQGQNQLYNELNLGRREEYDVLDKRRGRDPEMGGKPRRKNPQEGLYNELQKDKMAEAYSEIGMKGERRRGKGHDGLYQGLSTATKDTYDALHMQALPPR

SEQ ID NO: 2124 - protein, 482 aa, Artificial Sequence
  source: /note="Description of Artificial Sequence: Synthetic Chimeric Antigen Receptor sequence"
MALPVTALLLPLALLLHAARPEVQLLESGGGLVQPGGSLRLSCAASGFTFSSYAMNWVRQAPGKGLEWVSAISDSGGSRWYADSVKGRFTISRDNSKNTLYLQMNSLRAEDTAVYYCTRYWPMDIWGQGTLVTVSSGGGGSGGGGSGGGGSEIVLTQSPGTLSLSPGERATLSCRASVRVSSTYLAWYQQKPGQAPRLLMYDASIRATGIPDRFSGSGSGTDFTLTISRLEPEDFAVYYCQQYMKWPLTFGQGTKVEIKTTTPAPRPPTPAPTIASQPLSLRPEACRPAAGGAVHTRGLDFACDIYIWAPLAGTCGVLLLSLVITLYCKRGRKKLLYIFKQPFMRPVQTTQEEDGCSCRFPEEEEGGCELRVKFSRSADAPAYQQGQNQLYNELNLGRREEYDVLDKRRGRDPEMGGKPRRKNPQEGLYNELQKDKMAEAYSEIGMKGERRRGKGHDGLYQGLSTATKDTYDALHMQALPPR

SEQ ID NO: 2125 - protein, 668 aa, Artificial Sequence
  source: /note="Description of Artificial Sequence: Synthetic Chimeric Antigen Receptor sequence"
MALPVTALLLPLALLLHAARPEVQLLESGGGLVQPGGSLRLSCAASGFTFSSYAMNWVRQAPGKGLEWVSAISDSGGSRWYADSVKGRFTISRDNSKNTLYLQMNSLRAEDTAVYYCTRYWPMDIWGQGTLVTVSSGGGGSGGGGSGGGGSEIVLTQSPGTLSLSPGERATLSCRASVRVSSTYLAWYQQKPGQAPRLLMYDASIRATGIPDRFSGSGSGTDFTLTISRLEPEDFAVYYCQQYMKWPLTFGQGTKVEIKEPKSPDKTHTCPPCPAPPVAGPSVFLFPPKPKDTLMIARTPEVTCVVVDVSHEDPEVKFNWYVDGVEVHNAKTKPREEQYNSTYRVVSVLTVLHQDWLNGKEYKCKVSNKALPAPIEKTISKAKGQPREPQVYTLPPSRDELTKNQVSLTCLVKGFYPSDIAVEWESNGQPENNYKTTPPVLDSDGSFFLYSKLTVDKSRWQQGNVFSCSVMHEALHNHYTQKSLSLSPGKIYIWAPLAGTCGVLLLSLVITLYCKRGRKKLLYIFKQPFMRPVQTTQEEDGCSCRFPEEEEGGCELRVKFSRSADAPAYQQGQNQLYNELNLGRREEYDVLDKRRGRDPEMGGKPRRKNPQEGLYNELQKDKMAEAYSEIGMKGERRRGKGHDGLYQGLSTATKDTYDALHMQALPPR

SEQ ID NO: 2126 - protein, 487 aa, Artificial Sequence
  source: /note="Description of Artificial Sequence: Synthetic Chimeric Antigen Receptor sequence"
MALPVTALLLPLALLLHAARPQVQLQQSGAELARPGASVKLSCKASGYTFTSYWMQWVKQRPGQGLEWIGAIYPGDGDTRYTQKFKGKATLTADKSSSTAYMQLSSLASEDSAVYYCARGKVYYGSNPFAYWGQGTLVTVSAGGGGSGGGGSGGGGSDIQMTQSSSYLSVSLGGRVTITCKASDHINNWLAWYQQKPGNAPRLLISGATSLETGVPSRFSGSGSGKDYTLSITSLQTEDVATYYCQQYWSTPWTFGGGTKLEIKTTTPAPRPPTPAPTIASQPLSLRPEACRPAAGGAVHTRGLDFACDIYIWAPLAGTCGVLLLSLVITLYCKRGRKKLLYIFKQPFMRPVQTTQEEDGCSCRFPEEEEGGCELRVKFSRSADAPAYQQGQNQLYNELNLGRREEYDVLDKRRGRDPEMGGKPRRKNPQEGLYNELQKDKMAEAYSEIGMKGERRRGKGHDGLYQGLSTATKDTYDALHMQALPPR

SEQ ID NO: 2127 - protein, 432 aa, Artificial Sequence
  source: /note="Description of Artificial Sequence: Synthetic Chimeric Antigen Receptor sequence"
MALPVTALLLPLALLLHAARPEVKLLESGGGLVQPGGSLKLSCAASGFDFSRYWMSWVRQAPGKGLEWIGEINPDSSTINYTPSLKDKFIISRDNAKNTLYLQMSKVRSEDTALYYCARPDGNYWYFDVWGAGTTVTVSSGGGGSGGGGSGGGGSDIVMTQSHKFMSTSVGDRVSITCKASQDVGIAVAWYQQKPGQSPKLLIYWASTRHTGVPDRFTGSGSGTDFTLTISNVQSEDLADYFCQQYSSYPYTFGGGTKLEIKGLAVSTISSFFPPGYQKRGRKKLLYIFKQPFMRPVQTTQEEDGCSCRFPEEEEGGCELRVKFSRSADAPAYQQGQNQLYNELNLGRREEYDVLDKRRGRDPEMGGKPRRKNPQEGLYNELQKDKMAEAYSEIGMKGERRRGKGHDGLYQGLSTATKDTYDALHMQALPPR

SEQ ID NO: 2128 - protein, 433 aa, Artificial Sequence
  source: /note="Description of Artificial Sequence: Synthetic Chimeric Antigen Receptor sequence"
MALPVTALLLPLALLLHAARPQVQLQQPGAELVRPGASVKLSCKASGYSFTTYWMNWVKQRPGQGLEWIGMIHPSDSETRLNQKFKDKATLTVDKSSSTAYMQLSSPTSEDSAVYYCARSTMIATRAMDYWGQGTSVTVSSGGGGSGGGGSGGGGSDIVMTQSQKSMSTSVGDRVSITCKASQDVITGVAWYQQKPGQSPKLLIYSASYRYTGVPDRFTGSGSGTDFTFTISNVQAEDLAVYYCQQHYSTPLTFGAGTKLELKGLAVSTISSFFPPGYQKRGRKKLLYIFKQPFMRPVQTTQEEDGCSCRFPEEEEGGCELRVKFSRSADAPAYQQGQNQLYNELNLGRREEYDVLDKRRGRDPEMGGKPRRKNPQEGLYNELQKDKMAEAYSEIGMKGERRRGKGHDGLYQGLSTATKDTYDALHMQALPPR

SEQ ID NO: 2129 - protein, 433 aa, Artificial Sequence
  source: /note="Description of Artificial Sequence: Synthetic Chimeric Antigen Receptor sequence"
MALPVTALLLPLALLLHAARPQVQLQQSGPELVKPGASVKISCKASGYAFSSSWMNWVKQRPGQGLEWIGRIYPGDGDTKYNGKFKGKATLTADKSSSTAYMQLSSLTSVDSAVYFCARSTMIATGAMDYWGQGTSVTVSSGGGGSGGGGSGGGGSETTVTQSPASLSMAIGEKVTIRCITSTDIDDDMNWYQQKPGEPPKLLISEGNTLRPGVPSRFSSSGYGTDFVFTIENMLSEDVADYYCLQSDNLPLTFGGGTKLEIKGLAVSTISSFFPPGYQKRGRKKLLYIFKQPFMRPVQTTQEEDGCSCRFPEEEEGGCELRVKFSRSADAPAYQQGQNQLYNELNLGRREEYDVLDKRRGRDPEMGGKPRRKNPQEGLYNELQKDKMAEAYSEIGMKGERRRGKGHDGLYQGLSTATKDTYDALHMQALPPR

SEQ ID NO: 2130 - protein, 434 aa, Artificial Sequence
  source: /note="Description of Artificial Sequence: Synthetic Chimeric Antigen Receptor sequence"
MALPVTALLLPLALLLHAARPQVQLQQSGAELARPGASVKLSCKASGYTFTSYWMQWVKQRPGQGLEWIGAIYPGDGDTRYTQKFKGKATLTADKSSSTAYMQLSSLASEDSAVYYCARGKVYYGSNPFAYWGQGTLVTVSAGGGGSGGGGSGGGGSDIQMTQSSSYLSVSLGGRVTITCKASDHINNWLAWYQQKPGNAPRLLISGATSLETGVPSRFSGSGSGKDYTLSITSLQTEDVATYYCQQYWSTPWTFGGGTKLEIKGLAVSTISSFFPPGYQKRGRKKLLYIFKQPFMRPVQTTQEEDGCSCRFPEEEEGGCELRVKFSRSADAPAYQQGQNQLYNELNLGRREEYDVLDKRRGRDPEMGGKPRRKNPQEGLYNELQKDKMAEAYSEIGMKGERRRGKGHDGLYQGLSTATKDTYDALHMQALPPR

SEQ ID NO: 2131 - protein, 434 aa, Artificial Sequence
  source: /note="Description of Artificial Sequence: Synthetic Chimeric Antigen Receptor sequence"
MALPVTALLLPLALLLHAARPQVQLQQSGPELVKPGASVKISCKASGYAFSSSWMNWVKQRPGQGLEWIGRIYPGDGDTKYNGKFKGKATLTADKSSSTAYMQLSSLTSVDSAVYFCARSTMIATGAMDYWGQGTSVTVSSGGGGSGGGGSGGGGSDIVMTQSHKFMSTSVGDRVSITCKASQDVSTAVAWYQQKPGQSPKLLIYSASYRYTGVPDRFTGSGSGTDFTFTISSVQAEDLAVYYCQQHYSTPPYTFGGGTKLEIKGLAVSTISSFFPPGYQKRGRKKLLYIFKQPFMRPVQTTQEEDGCSCRFPEEEEGGCELRVKFSRSADAPAYQQGQNQLYNELNLGRREEYDVLDKRRGRDPEMGGKPRRKNPQEGLYNELQKDKMAEAYSEIGMKGERRRGKGHDGLYQGLSTATKDTYDALHMQALPPR

SEQ ID NO: 2132 - protein, 459 aa, Artificial Sequence
  source: /note="Description of Artificial Sequence: Synthetic Chimeric Antigen Receptor sequence"
MGWSSIILFLVATATGVHSQVQLQQPGAELVRPGASVKLSCKASGYSFTTYWMNWVKQRPGQGLEWIGMIHPSDSETRLNQKFKDKATLTVDKSSSTAYMQLSSPTSEDSAVYYCARSTMIATRAMDYWGQGTSVTVSGGGGSGGGGSGGGGSDIVMTQSQKSMSTSVGDRVSITCKASQDVITGVAWYQQKPGQSPKLLIYSASYRYTGVPDRFTGSGSGTDFTFTISNVQAEDLAVYYCQQHYSTPLTFGAGTKLELKLEPKSCDKTHTCPPCPDPKFWVLVVVGGVLACYSLLVTVAFIIFWVRSKRSRLLHSDYMNMTPRRPGPTRKHYQPYAPPRDFAAYRSRVKFSRSADAPAYQQGQNQLYNELNLGRREEYDVLDKRRGRDPEMGGKPRRKNPQEGLYNELQKDKMAEAYSEIGMKGERRRGKGHDGLYQGLSTATKDTYDALHMQALPPR

SEQ ID NO: 2133 - protein, 485 aa, Artificial Sequence
  source: /note="Description of Artificial Sequence: Synthetic Chimeric Antigen Receptor sequence"
MALPVTALLLPLALLLHAARPEVKLLESGGGLVQPGGSLKLSCAASGFDFSRYWMSWVRQAPGKGLEWIGEINPDSSTINYTPSLKDKFIISRDNAKNTLYLQMSKVRSEDTALYYCARPDGNYWYFDVWGAGTTVTVSSGGGGSGGGGSGGGGSDIVMTQSHKFMSTSVGDRVSITCKASQDVGIAVAWYQQKPGQSPKLLIYWASTRHTGVPDRFTGSGSGTDFTLTISNVQSEDLADYFCQQYSSYPYTFGGGTKLEIKTTTPAPRPPTPAPTIASQPLSLRPEACRPAAGGAVHTRGLDFACDIYIWAPLAGTCGVLLLSLVITLYCKRGRKKLLYIFKQPFMRPVQTTQEEDGCSCRFPEEEEGGCELRVKFSRSADAPAYQQGQNQLYNELNLGRREEYDVLDKRRGRDPEMGGKPRRKNPQEGLYNELQKDKMAEAYSEIGMKGERRRGKGHDGLYQGLSTATKDTYDALHMQALPPR

SEQ ID NO: 2134 - protein, 486 aa, Artificial Sequence
  source: /note="Description of Artificial Sequence: Synthetic Chimeric Antigen Receptor sequence"
MALPVTALLLPLALLLHAARPQVQLQQPGAELVRPGASVKLSCKASGYSFTTYWMNWVKQRPGQGLEWIGMIHPSDSETRLNQKFKDKATLTVDKSSSTAYMQLSSPTSEDSAVYYCARSTMIATRAMDYWGQGTSVTVSSGGGGSGGGGSGGGGSDIVMTQSQKSMSTSVGDRVSITCKASQDVITGVAWYQQKPGQSPKLLIYSASYRYTGVPDRFTGSGSGTDFTFTISNVQAEDLAVYYCQQHYSTPLTFGAGTKLELKTTTPAPRPPTPAPTIASQPLSLRPEACRPAAGGAVHTRGLDFACDIYIWAPLAGTCGVLLLSLVITLYCKRGRKKLLYIFKQPFMRPVQTTQEEDGCSCRFPEEEEGGCELRVKFSRSADAPAYQQGQNQLYNELNLGRREEYDVLDKRRGRDPEMGGKPRRKNPQEGLYNELQKDKMAEAYSEIGMKGERRRGKGHDGLYQGLSTATKDTYDALHMQALPPR

SEQ ID NO: 2135 - protein, 487 aa, Artificial Sequence
  source: /note="Description of Artificial Sequence: Synthetic Chimeric Antigen Receptor sequence"
MALPVTALLLPLALLLHAARPQVQLQQSGPELVKPGASVKISCKASGYAFSSSWMNWVKQRPGQGLEWIGRIYPGDGDTKYNGKFKGKATLTADKSSSTAYMQLSSLTSVDSAVYFCARSTMIATGAMDYWGQGTSVTVSSGGGGSGGGGSGGGGSDIVMTQSHKFMSTSVGDRVSITCKASQDVSTAVAWYQQKPGQSPKLLIYSASYRYTGVPDRFTGSGSGTDFTFTISSVQAEDLAVYYCQQHYSTPPYTFGGGTKLEIKTTTPAPRPPTPAPTIASQPLSLRPEACRPAAGGAVHTRGLDFACDIYIWAPLAGTCGVLLLSLVITLYCKRGRKKLLYIFKQPFMRPVQTTQEEDGCSCRFPEEEEGGCELRVKFSRSADAPAYQQGQNQLYNELNLGRREEYDVLDKRRGRDPEMGGKPRRKNPQEGLYNELQKDKMAEAYSEIGMKGERRRGKGHDGLYQGLSTATKDTYDALHMQALPPR

SEQ ID NO: 2136 - protein, 488 aa, Artificial Sequence
  source: /note="Description of Artificial Sequence: Synthetic Chimeric Antigen Receptor sequence"
MALPVTALLLPLALLLHAARPGSDIQMTQSPSSLSASVGDRVTITCRASQGIRNNLAWYQQKPGKAPKRLIYAASNLQSGVPSRFTGSGSGTEFTLIVSSLQPEDFATYYCLQHHSYPLTSGGGTKVEIKRTGSTSGSGKPGSGEGSEVQVLESGGGLVQPGGSLRLSCAASGFTFSSYAMSWVRQAPGKGLEWVSAISGSGGSTNYADSVKGRFTISRDNSKNTLYLQMNSLRAEDTAVYYCAGSSGWSEYWGQGTLVTVSSASTTTPAPRPPTPAPTIASQPLSLRPEACRPAAGGAVHTRGLDFACDIYIWAPLAGTCGVLLLSLVITLYCKRGRKKLLYIFKQPFMRPVQTTQEEDGCSCRFPEEEEGGCELRVKFSRSADAPAYKQGQNQLYNELNLGRREEYDVLDKRRGRDPEMGGKPRRKNPQEGLYNELQKDKMAEAYSEIGMKGERRRGKGHDGLYQGLSTATKDTYDALHMQALPPR

SEQ ID NO: 2137 - protein, 647 aa, Artificial Sequence
  source: /note="Description of Artificial Sequence: Synthetic Chimeric Antigen Receptor sequence"
MALPVTALLLPLALLLHAARPEVKLLESGGGLVQPGGSLKLSCAASGFDFSRYWMSWVRQAPGKGLEWIGEINPDSSTINYTPSLKDKFIISRDNAKNTLYLQMSKVRSEDTALYYCARPDGNYWYFDVWGAGTTVTVSSGGGGSGGGGSGGGGSDIVMTQSHKFMSTSVGDRVSITCKASQDVGIAVAWYQQKPGQSPKLLIYWASTRHTGVPDRFTGSGSGTDFTLTISNVQSEDLADYFCQQYSSYPYTFGGGTKLEIKEPKSPDKTHTCPPCPAPPVAGPSVFLFPPKPKDTLMIARTPEVTCVVVDVSHEDPEVKFNWYVDGVEVHNAKTKPREEQYNSTYRVVSVLTVLHQDWLNGKEYKCKVSNKALPAPIEKTISKAKGQPREPQVYTLPPSRDELTKNQVSLTCLVKGFYPSDIAVEWESNGQPENNYKTTPPVLDSDGSFFLYSKLTVDKSRWQQGNVFSCSVMHEALHNHYTQKSLSLSPGKKRGRKKLLYIFKQPFMRPVQTTQEEDGCSCRFPEEEEGGCELRVKFSRSADAPAYQQGQNQLYNELNLGRREEYDVLDKRRGRDPEMGGKPRRKNPQEGLYNELQKDKMAEAYSEIGMKGERRRGKGHDGLYQGLSTATKDTYDALHMQALPPR

SEQ ID NO: 2138 - protein, 648 aa, Artificial Sequence
  source: /note="Description of Artificial Sequence: Synthetic Chimeric Antigen Receptor sequence"
MALPVTALLLPLALLLHAARPQVQLQQPGAELVRPGASVKLSCKASGYSFTTYWMNWVKQRPGQGLEWIGMIHPSDSETRLNQKFKDKATLTVDKSSSTAYMQLSSPTSEDSAVYYCARSTMIATRAMDYWGQGTSVTVSSGGGGSGGGGSGGGGSDIVMTQSQKSMSTSVGDRVSITCKASQDVITGVAWYQQKPGQSPKLLIYSASYRYTGVPDRFTGSGSGTDFTFTISNVQAEDLAVYYCQQHYSTPLTFGAGTKLELKEPKSPDKTHTCPPCPAPPVAGPSVFLFPPKPKDTLMIARTPEVTCVVVDVSHEDPEVKFNWYVDGVEVHNAKTKPREEQYNSTYRVVSVLTVLHQDWLNGKEYKCKVSNKALPAPIEKTISKAKGQPREPQVYTLPPSRDELTKNQVSLTCLVKGFYPSDIAVEWESNGQPENNYKTTPPVLDSDGSFFLYSKLTVDKSRWQQGNVFSCSVMHEALHNHYTQKSLSLSPGKKRGRKKLLYIFKQPFMRPVQTTQEEDGCSCRFPEEEEGGCELRVKFSRSADAPAYQQGQNQLYNELNLGRREEYDVLDKRRGRDPEMGGKPRRKNPQEGLYNELQKDKMAEAYSEIGMKGERRRGKGHDGLYQGLSTATKDTYDALHMQALPPR

SEQ ID NO: 2139 - protein, 648 aa, Artificial Sequence
  source: /note="Description of Artificial Sequence: Synthetic Chimeric Antigen Receptor sequence"
MALPVTALLLPLALLLHAARPQVQLQQSGPELVKPGASVKISCKASGYAFSSSWMNWVKQRPGQGLEWIGRIYPGDGDTKYNGKFKGKATLTADKSSSTAYMQLSSLTSVDSAVYFCARSTMIATGAMDYWGQGTSVTVSSGGGGSGGGGSGGGGSETTVTQSPASLSMAIGEKVTIRCITSTDIDDDMNWYQQKPGEPPKLLISEGNTLRPGVPSRFSSSGYGTDFVFTIENMLSEDVADYYCLQSDNLPLTFGGGTKLEIKEPKSPDKTHTCPPCPAPPVAGPSVFLFPPKPKDTLMIARTPEVTCVVVDVSHEDPEVKFNWYVDGVEVHNAKTKPREEQYNSTYRVVSVLTVLHQDWLNGKEYKCKVSNKALPAPIEKTISKAKGQPREPQVYTLPPSRDELTKNQVSLTCLVKGFYPSDIAVEWESNGQPENNYKTTPPVLDSDGSFFLYSKLTVDKSRWQQGNVFSCSVMHEALHNHYTQKSLSLSPGKKRGRKKLLYIFKQPFMRPVQTTQEEDGCSCRFPEEEEGGCELRVKFSRSADAPAYQQGQNQLYNELNLGRREEYDVLDKRRGRDPEMGGKPRRKNPQEGLYNELQKDKMAEAYSEIGMKGERRRGKGHDGLYQGLSTATKDTYDALHMQALPPR

SEQ ID NO: 2140 - protein, 649 aa, Artificial Sequence
  source: /note="Description of Artificial Sequence: Synthetic Chimeric Antigen Receptor sequence"
MALPVTALLLPLALLLHAARPQVQLQQSGAELARPGASVKLSCKASGYTFTSYWMQWVKQRPGQGLEWIGAIYPGDGDTRYTQKFKGKATLTADKSSSTAYMQLSSLASEDSAVYYCARGKVYYGSNPFAYWGQGTLVTVSAGGGGSGGGGSGGGGSDIQMTQSSSYLSVSLGGRVTITCKASDHINNWLAWYQQKPGNAPRLLISGATSLETGVPSRFSGSGSGKDYTLSITSLQTEDVATYYCQQYWSTPWTFGGGTKLEIKEPKSPDKTHTCPPCPAPPVAGPSVFLFPPKPKDTLMIARTPEVTCVVVDVSHEDPEVKFNWYVDGVEVHNAKTKPREEQYNSTYRVVSVLTVLHQDWLNGKEYKCKVSNKALPAPIEKTISKAKGQPREPQVYTLPPSRDELTKNQVSLTCLVKGFYPSDIAVEWESNGQPENNYKTTPPVLDSDGSFFLYSKLTVDKSRWQQGNVFSCSVMHEALHNHYTQKSLSLSPGKKRGRKKLLYIFKQPFMRPVQTTQEEDGCSCRFPEEEEGGCELRVKFSRSADAPAYQQGQNQLYNELNLGRREEYDVLDKRRGRDPEMGGKPRRKNPQEGLYNELQKDKMAEAYSEIGMKGERRRGKGHDGLYQGLSTATKDTYDALHMQALPPR

SEQ ID NO: 2141 - protein, 649 aa, Artificial Sequence
  source: /note="Description of Artificial Sequence: Synthetic Chimeric Antigen Receptor sequence"
MALPVTALLLPLALLLHAARPQVQLQQSGPELVKPGASVKISCKASGYAFSSSWMNWVKQRPGQGLEWIGRIYPGDGDTKYNGKFKGKATLTADKSSSTAYMQLSSLTSVDSAVYFCARSTMIATGAMDYWGQGTSVTVSSGGGGSGGGGSGGGGSDIVMTQSHKFMSTSVGDRVSITCKASQDVSTAVAWYQQKPGQSPKLLIYSASYRYTGVPDRFTGSGSGTDFTFTISSVQAEDLAVYYCQQHYSTPPYTFGGGTKLEIKEPKSPDKTHTCPPCPAPPVAGPSVFLFPPKPKDTLMIARTPEVTCVVVDVSHEDPEVKFNWYVDGVEVHNAKTKPREEQYNSTYRVVSVLTVLHQDWLNGKEYKCKVSNKALPAPIEKTISKAKGQPREPQVYTLPPSRDELTKNQVSLTCLVKGFYPSDIAVEWESNGQPENNYKTTPPVLDSDGSFFLYSKLTVDKSRWQQGNVFSCSVMHEALHNHYTQKSLSLSPGKKRGRKKLLYIFKQPFMRPVQTTQEEDGCSCRFPEEEEGGCELRVKFSRSADAPAYQQGQNQLYNELNLGRREEYDVLDKRRGRDPEMGGKPRRKNPQEGLYNELQKDKMAEAYSEIGMKGERRRGKGHDGLYQGLSTATKDTYDALHMQALPPR

SEQ ID NO: 2142 - protein, 271 aa, Artificial Sequence
  source: /note="Description of Artificial Sequence: Synthetic polypeptide"
MALPVTALLLPLALLLHAARPDIQMTQTTSSLSASLGDRVTISCRASQDISKYLNWYQQKPDGTVKLLIYHTSRLHSGVPSRFSGSGSGTDYSLTISNLEQEDIATYFCQQGNTLPYTFGGGTKLEITGGGGSGGGGSGGGGSEVKLQESGPGLVAPSQSLSVTCTVSGVSLPDYGVSWIRQPPRKGLEWLGVIWGSETTYYNSALKSRLTIIKDNSKSQVFLKMNSLQTDDTAIYYCAKHYYYGGSYAMDYWGQGTSVTVSSHHHHHHHH

SEQ ID NO: 2143 - protein, 719 aa, Artificial Sequence
  source: /note="Description of Artificial Sequence: Synthetic Chimeric Antigen Receptor sequence"
ADAPAYQQGQNQLYNELNLGRREEYDVLDKRRGRDPEMGGKPRRKNPQEGLYNELQKDKMAEAYSEIGMKGERRRGKGHDGLYQGLSTATKDTYDALHMQALPPRRAEGRGSLLTCGDVEENPGPMAVPTQVLGLLLLWLTDARCDIQMTQSPSSLSASVGDRVTITCRASEDIYFNLVWYQQKPGKAPKLLIYDTNRLADGVPSRFSGSGSGTQYTLTISSLQPEDFATYYCQHYKNYPLTFGQGTKLEIKRSGGGGSGGGGSGGGGSRSEVQLVESGGGLVQPGGSLRLSCAASGFTLSNYGMHWIRQAPGKGLEWVSSISLNGGSTYYRDSVKGRFTISRDNAKSTLYLQMNSLRAEDTAVYYCAAQDAYTGGYFDYWGQGTLVTVSSMPCPAPPVAGPSVFLFPPKPKDTLMIARTPEVTCVVVDVSHEDPEVKFNWYVDGVEVHNAKTKPREEQYNSTYRVVSVLTVLHQDWLNGKEYKCKVSNKALPAPIEKTISKAKPCPAPPVAGPSVFLFPPKPKDTLMIARTPEVTCVVVDVSHEDPEVKFNWYVDGVEVHNAKTKPREEQYNSTYRVVSVLTVLHQDWLNGKEYKCKVSNKALPAPIEKTISKAKMALIVLGGVAGLLLFIGLGIFFMALIVLGGVAGLLLFIGLGIFFCVRCRHRRRSGGGGSSHIQIPPGLTELLQGYTVEVLRQQPPDLVEFAVEYFTRLREARA

SEQ ID NO: 2144 - protein, 671 aa, Artificial Sequence
  source: /note="Description of Artificial Sequence: Synthetic Chimeric Antigen Receptor sequence"
MLTSLLCWMALCLLGADHADACPYSNPSLCSGGGGSELPTQGTFSNVSTNVSPAKPTTTACPYSNPSLCSGGGGSPAPRPPTPAPTIASQPLSLRPEACRPAAGGAVHTRGLDFACDIYIWAPLAGTCGVLLLSLVITLYCNHRNRRRVCKCPRPVVRAEGRGSLLTCGDVEENPGPMETDTLLLWVLLLWVPGSTGDIQMTQTTSSLSASLGDRVTISCRASQDISKYLNWYQQKPDGTVKLLIYHTSRLHSGVPSRFSGSGSGTDYSLTISNLEQEDIATYFCQQGNTLPYTFGGGTKLEITKAGGGGSGGGGSGGGGSGGGGSEVKLQESGPGLVAPSQSLSVTCTVSGVSLPDYGVSWIRQPPRKGLEWLGVIWGSETTYYNSALKSRLTIIKDNSKSQVFLKMNSLQTDDTAIYYCAKHYYYGGSYAMDYWGQGTSVTVSSDPTTTPAPRPPTPAPTIASQPLSLRPEACRPAAGGAVHTRGLDFACDIYIWAPLAGTCGVLLLSLVITLYCKRGRKKLLYIFKQPFMRPVQTTQEEDGCSCRFPEEEEGGCELRVKFSRSADAPAYQQGQNQLYNELNLGRREEYDVLDKRRGRDPEMGGKPRRKNPQEGLYNELQKDKMAEAYSEIGMKGERRRGKGHDGLYQGLSTATKDTYDALHMQALPPR

SEQ ID NO: 2145 - protein, 461 aa, Artificial Sequence
  source: /note="Description of Artificial Sequence: Synthetic Chimeric Antigen Receptor sequence"
EVQVLESGGGLVQPGGSLRLSCAASGFTFSSYAMSWVRQAPGKGLEWVSAISGSGGSTNYADSVKGRFTISRDNSKNTLYLQMNSLRAEDTAVYYCAGSSGWSEYWGQGTLVTVSSGGGGSGGGGSGGGGSDIQMTQSPSSLSASVGDRVTITCRASQGIRNNLAWYQQKPGKAPKRLIYAASNLQSGVPSRFTGSGSGTEFTLIVSSLQPEDFATYYCLQHHSYPLTSGGGTKVEIKTTTPAPRPPTPAPTIASQPLSLRPEACRPAAGGAVHTRGLDFACDIYIWAPLAGTCGVLLLSLVITLYCKRGRKKLLYIFKQPFMRPVQTTQEEDGCSCRFPEEEEGGCELRVKFSRSADAPAYQQGQNQLYNELNLGRREEYDVLDKRRGRDPEMGGKPRRKNPQEGLYNELQKDKMAEAYSEIGMKGERRRGKGHDGLYQGLSTATKDTYDALHMQALPPR

SEQ ID NO: 2146 - protein, 554 aa, Artificial Sequence
  source: /note="Description of Artificial Sequence: Synthetic Chimeric Antigen Receptor sequence"
MKHLWFFLLLVAAPRWVLSQVQLQESGPGLVKPSETLSLTCTVSGGSISSSSYYWGWIRQPPGKGLEWIGSIYYSGSTYYNPSLKSRVTISVDTSKNQFSLKLSSVTAADTAVYYCARLPMVTMSFDYWGQGTLVTVSRGGGGSGGGGSGGGGSMASYVLTQPPSVSVAPGKTARITCGGNNIGSKSVHWYQQKPGQAPVLVIYYDSDRPSGIPERFSGSNSGNTATLTISRVEAGDEADYYCQVWDSSSDHVVFGGGTKLTVLGQPKAAPSVTLFPPSSEELQANKATLVCLISDFYPGAVTVAWKADSSPVKAGVETTTPSKQSNNKYAASSYLSLTPEQWKSHRSYSCQVTHEGSTVEKTVAPTECSTRFWVLVVVGGVLACYSLLVTVAFIIFWVRSKRSRLLHSDYMNMTPRRPGPTRKHYQPYAPPRDFAAYRSLRVKFSRSADAPAYQQGQNQLYNELNLGRREEYDVLDKRRGRDPEMGGKPQRRKNPQEGLYNELQKDKMAEAYSEIGMKGERRRGKGHDGLYQGLSTATKDTYDALHMQALPPR

SEQ ID NO: 2147 - protein, 563 aa, Artificial Sequence
  source: /note="Description of Artificial Sequence: Synthetic Chimeric Antigen Receptor sequence"
MKHLWFFLLLVAAPRWVLSQVQLQESGPGLVKPSETLSLTCTVSGGSISSSSYYWGWIRQPPGKGLEWIGSIYYSGSTYYNPSLKSRVTISVDTSKNQFSLKLSSVTAADTAVYYCARLPMVTMSFDYWGQGTLVTVSRGGGGSGGGGSGGGGSMASYVLTQPPSVSVAPGKTARITCGGNNIGSKSVHWYQQKPGQAPVLVIYYDSDRPSGIPERFSGSNSGNTATLTISRVEAGDEADYYCQVWDSSSDHVVFGGGTKLTVLGQPKAAPSVTLFPPSSEELQANKATLVCLISDFYPGAVTVAWKADSSPVKAGVETTTPSKQSNNKYAASSYLSLTPEQWKSHRSYSCQVTHEGSTVEKTVAPTECSTRFWVLVVVGGVLACYSLLVTVAFIIFWVRLRVKFSRSADAPAYQQGQNQLYNELNLGRREEYDVLDKRRGRDPEMGGKPQRRKNPQEGLYNELQKDKMAEAYSEIGMKGERRRGKGHDGLYQGLSTATKDTYDALHMQALPPRRSQCMWPRETQLLLEVPPSTEDARSCQFPEEERGERSAEEKGRLGDLWV

SEQ ID NO: 2148 - protein, 603 aa, Artificial Sequence
  source: /note="Description of Artificial Sequence: Synthetic Chimeric Antigen Receptor sequence"
MKHLWFFLLLVAAPRWVLSQVQLQESGPGLVKPSETLSLTCTVSGGSISSSSYYWGWIRQPPGKGLEWIGSIYYSGSTYYNPSLKSRVTISVDTSKNQFSLKLSSVTAADTAVYYCARLPMVTMSFDYWGQGTLVTVSRGGGGSGGGGSGGGGSMASYVLTQPPSVSVAPGKTARITCGGNNIGSKSVHWYQQKPGQAPVLVIYYDSDRPSGIPERFSGSNSGNTATLTISRVEAGDEADYYCQVWDSSSDHVVFGGGTKLTVLGQPKAAPSVTLFPPSSEELQANKATLVCLISDFYPGAVTVAWKADSSPVKAGVETTTPSKQSNNKYAASSYLSLTPEQWKSHRSYSCQVTHEGSTVEKTVAPTECSTRFWVLVVVGGVLACYSLLVTVAFIIFWVRSKRSRLLHSDYMNMTPRRPGPTRKHYQPYAPPRDFAAYRSLRVKFSRSADAPAYQQGQNQLYNELNLGRREEYDVLDKRRGRDPEMGGKPQRRKNPQEGLYNELQKDKMAEAYSEIGMKGERRRGKGHDGLYQGLSTATKDTYDALHMQALPPRRSQCMWPRETQLLLEVPPSTEDARSCQFPEEERGERSAEEKGRLGDLWV

SEQ ID NO: 2149 - protein, 603 aa, Artificial Sequence [sequence omitted]

SEQ ID NO: 2150 - protein, 603 aa, Artificial Sequence [sequence omitted]

SEQ ID NO: 2151 - protein, 484 aa, Artificial Sequence
  source: /note="Description of Artificial Sequence: Synthetic Chimeric Antigen Receptor sequence"
MALPVTALLLPLALLLHAARPDIQMTQSPSSLSASVGDRVTITCRASQGIRNNLAWYQQKPGKAPKRLIYAASNLQSGVPSRFTGSGSGTEFTLIVSSLQPEDFATYYCLQHHSYPLTSGGGTKVEIKRTGSTSGSGKPGSGEGSEVQVLESGGGLVQPGGSLRLSCAASGFTFSSYAMSWVRQAPGKGLEWVSAISGSGGSTNYADSVKGRFTISRDNSKNTLYLQMNSLRAEDTAVYYCAGSSGWSEYWGQGTLVTVSSTTTPAPRPPTPAPTIASQPLSLRPEACRPAAGGAVHTRGLDFACDIYIWAPLAGTCGVLLLSLVITLYCKRGRKKLLYIFKQPFMRPVQTTQEEDGCSCRFPEEEEGGCELRVKFSRSADAPAYKQGQNQLYNELNLGRREEYDVLDKRRGRDPEMGGKPRRKNPQEGLYNELQKDKMAEAYSEIGMKGERRRGKGHDGLYQGLSTATKDTYDALHMQALPPR

SEQ ID NO: 2152 - protein, 491 aa, Artificial Sequence
  source: /note="Description of Artificial Sequence: Synthetic Chimeric Antigen Receptor sequence"
MALPVTALLLPLALLLHAARPGSEIQLQQSGAELVKPGASVKLSCTGSGFNIEDYYIHWVKQRTEQGLEWIGRIDPENDETKYGPIFQGRATITADTSSNTVYLQLSSLTSEDTAVYYCAFRGGVYWGPGTTLTVSSGGGGSGGGGSGGGGSHMDVVMTQSPLTLSVAIGQSASISCKSSQSLLDSDGKTYLNWLLQRPGQSPKRLISLVSKLDSGVPDRFTGSGSGTDFTLRISRVEAEDLGIYYCWQGTHFPGTFGGGTKLEIKASTTTPAPRPPTPAPTIASQPLSLRPEACRPAAGGAVHTRGLDFACDIYIWAPLAGTCGVLLLSLVITLYCKRGRKKLLYIFKQPFMRPVQTTQEEDGCSCRFPEEEEGGCELRVKFSRSADAPAYKQGQNQLYNELNLGRREEYDVLDKRRGRDPEMGGKPRRKNPQEGLYNELQKDKMAEAYSEIGMKGERRRGKGHDGLYQGLSTATKDTYDALHMQALPPR

SEQ ID NO: 2153 - protein, 490 aa, Artificial Sequence
  source: /note="Description of Artificial Sequence: Synthetic Chimeric Antigen Receptor sequence"
MALPVTALLLPLALLLHAARPDVVMTQSPDSLAVSLGERATINCKSSQSLLDSDGKTYLNWLQQKPGQPPKRLISLVSKLDSGVPDRFSGSGSGTDFTLTISSLQAEDVAVYYCWQGTHFPGTFGGGTKVEIKGGGGSGGGGSGGGGSGGGGSEIQLVQSGAEVKKPGATVKISCKGSGFNIEDYYIHWVQQAPGKGLEWMGRIDPENDETKYGPIFQGRVTITADTSTNTVYMELSSLRSEDTAVYYCAFRGGVYWGQGTTVTVSSTTTPAPRPPTPAPTIASQPLSLRPEACRPAAGGAVHTRGLDFACDIYIWAPLAGTCGVLLLSLVITLYCKRGRKKLLYIFKQPFMRPVQTTQEEDGCSCRFPEEEEGGCELRVKFSRSADAPAYKQGQNQLYNELNLGRREEYDVLDKRRGRDPEMGGKPRRKNPQEGLYNELQKDKMAEAYSEIGMKGERRRGKGHDGLYQGLSTATKDTYDALHMQALPPR

SEQ ID NO: 2154 - protein, 490 aa, Artificial Sequence
  source: /note="Description of Artificial Sequence: Synthetic Chimeric Antigen Receptor sequence"
MALPVTALLLPLALLLHAARPEIQLVQSGAEVKKPGESLRISCKGSGFNIEDYYIHWVRQMPGKGLEWMGRIDPENDETKYGPIFQGHVTISADTSINTVYLQWSSLKASDTAMYYCAFRGGVYWGQGTTVTVSSGGGGSGGGGSGGGGSGGGGSDVVMTQSPLSLPVTLGQPASISCKSSQSLLDSDGKTYLNWLQQRPGQSPRRLISLVSKLDSGVPDRFSGSGSGTDFTLKISRVEAEDVGVYYCWQGTHFPGTFGGGTKVEIKTTTPAPRPPTPAPTIASQPLSLRPEACRPAAGGAVHTRGLDFACDIYIWAPLAGTCGVLLLSLVITLYCKRGRKKLLYIFKQPFMRPVQTTQEEDGCSCRFPEEEEGGCELRVKFSRSADAPAYKQGQNQLYNELNLGRREEYDVLDKRRGRDPEMGGKPRRKNPQEGLYNELQKDKMAEAYSEIGMKGERRRGKGHDGLYQGLSTATKDTYDALHMQALPPR

SEQ ID NO: 2155 - protein, 490 aa, Artificial Sequence
  source: /note="Description of Artificial Sequence: Synthetic Chimeric Antigen Receptor sequence"
MALPVTALLLPLALLLHAARPDVVMTQSPLSLPVTLGQPASISCKSSQSLLDSDGKTYLNWLQQRPGQSPRRLISLVSKLDSGVPDRFSGSGSGTDFTLKISRVEAEDVGVYYCWQGTHFPGTFGGGTKVEIKGGGGSGGGGSGGGGSGGGGSEIQLVQSGAEVKKPGESLRISCKGSGFNIEDYYIHWVRQMPGKGLEWMGRIDPENDETKYGPIFQGHVTISADTSINTVYLQWSSLKASDTAMYYCAFRGGVYWGQGTTVTVSSTTTPAPRPPTPAPTIASQPLSLRPEACRPAAGGAVHTRGLDFACDIYIWAPLAGTCGVLLLSLVITLYCKRGRKKLLYIFKQPFMRPVQTTQEEDGCSCRFPEEEEGGCELRVKFSRSADAPAYKQGQNQLYNELNLGRREEYDVLDKRRGRDPEMGGKPRRKNPQEGLYNELQKDKMAEAYSEIGMKGERRRGKGHDGLYQGLSTATKDTYDALHMQALPPR

SEQ ID NO: 2156 - protein, 490 aa, Artificial Sequence
  source: /note="Description of Artificial Sequence: Synthetic Chimeric Antigen Receptor sequence"
MALPVTALLLPLALLLHAARPEIQLVQSGAEVKKPGATVKISCKGSGFNIEDYYIHWVQQAPGKGLEWMGRIDPENDETKYGPIFQGRVTITADTSTNTVYMELSSLRSEDTAVYYCAFRGGVYWGQGTTVTVSSGGGGSGGGGSGGGGSGGGGSDVVMTQSPLSLPVTLGQPASISCKSSQSLLDSDGKTYLNWLQQRPGQSPRRLISLVSKLDSGVPDRFSGSGSGTDFTLKISRVEAEDVGVYYCWQGTHFPGTFGGGTKVEIKTTTPAPRPPTPAPTIASQPLSLRPEACRPAAGGAVHTRGLDFACDIYIWAPLAGTCGVLLLSLVITLYCKRGRKKLLYIFKQPFMRPVQTTQEEDGCSCRFPEEEEGGCELRVKFSRSADAPAYKQGQNQLYNELNLGRREEYDVLDKRRGRDPEMGGKPRRKNPQEGLYNELQKDKMAEAYSEIGMKGERRRGKGHDGLYQGLSTATKDTYDALHMQALPPR

SEQ ID NO: 2157 - protein, 490 aa, Artificial Sequence
  source: /note="Description of Artificial Sequence: Synthetic Chimeric Antigen Receptor sequence"
MALPVTALLLPLALLLHAARPEIQLVQSGAEVKKPGESLRISCKGSGFNIEDYYIHWVRQMPGKGLEWMGRIDPENDETKYGPIFQGHVTISADTSINTVYLQWSSLKASDTAMYYCAFRGGVYWGQGTTVTVSSGGGGSGGGGSGGGGSGGGGSDVVMTQSPDSLAVSLGERATINCKSSQSLLDSDGKTYLNWLQQKPGQPPKRLISLVSKLDSGVPDRFSGSGSGTDFTLTISSLQAEDVAVYYCWQGTHFPGTFGGGTKVEIKTTTPAPRPPTPAPTIASQPLSLRPEACRPAAGGAVHTRGLDFACDIYIWAPLAGTCGVLLLSLVITLYCKRGRKKLLYIFKQPFMRPVQTTQEEDGCSCRFPEEEEGGCELRVKFSRSADAPAYKQGQNQLYNELNLGRREEYDVLDKRRGRDPEMGGKPRRKNPQEGLYNELQKDKMAEAYSEIGMKGERRRGKGHDGLYQGLSTATKDTYDALHMQALPPR

SEQ ID NO: 2158 - protein, 490 aa, Artificial Sequence
  source: /note="Description of Artificial Sequence: Synthetic Chimeric Antigen Receptor sequence"
MALPVTALLLPLALLLHAARPDVVMTQSPDSLAVSLGERATINCKSSQSLLDSDGKTYLNWLQQKPGQPPKRLISLVSKLDSGVPDRFSGSGSGTDFTLTISSLQAEDVAVYYCWQGTHFPGTFGGGTKVEIKGGGGSGGGGSGGGGSGGGGSEIQLVQSGAEVKKPGESLRISCKGSGFNIEDYYIHWVRQMPGKGLEWMGRIDPENDETKYGPIFQGHVTISADTSINTVYLQWSSLKASDTAMYYCAFRGGVYWGQGTTVTVSSTTTPAPRPPTPAPTIASQPLSLRPEACRPAAGGAVHTRGLDFACDIYIWAPLAGTCGVLLLSLVITLYCKRGRKKLLYIFKQPFMRPVQTTQEEDGCSCRFPEEEEGGCELRVKFSRSADAPAYKQGQNQLYNELNLGRREEYDVLDKRRGRDPEMGGKPRRKNPQEGLYNELQKDKMAEAYSEIGMKGERRRGKGHDGLYQGLSTATKDTYDALHMQALPPR

SEQ ID NO: 2159 - protein, 490 aa, Artificial Sequence
  source: /note="Description of Artificial Sequence: Synthetic Chimeric Antigen Receptor sequence"
MALPVTALLLPLALLLHAARPDVVMTQSPLSLPVTLGQPASISCKSSQSLLDSDGKTYLNWLQQRPGQSPRRLISLVSKLDSGVPDRFSGSGSGTDFTLKISRVEAEDVGVYYCWQGTHFPGTFGGGTKVEIKGGGGSGGGGSGGGGSGGGGSEIQLVQSGAEVKKPGATVKISCKGSGFNIEDYYIHWVQQAPGKGLEWMGRIDPENDETKYGPIFQGRVTITADTSTNTVYMELSSLRSEDTAVYYCAFRGGVYWGQGTTVTVSSTTTPAPRPPTPAPTIASQPLSLRPEACRPAAGGAVHTRGLDFACDIYIWAPLAGTCGVLLLSLVITLYCKRGRKKLLYIFKQPFMRPVQTTQEEDGCSCRFPEEEEGGCELRVKFSRSADAPAYKQGQNQLYNELNLGRREEYDVLDKRRGRDPEMGGKPRRKNPQEGLYNELQKDKMAEAYSEIGMKGERRRGKGHDGLYQGLSTATKDTYDALHMQALPPR

SEQ ID NO: 2160 - protein, 487 aa, Artificial Sequence
  source: /note="Description of Artificial Sequence: Synthetic Chimeric Antigen Receptor sequence"
MALPVTALLLPLALLLHAARPEIQLQQSGAELVKPGASVKLSCTGSGFNIEDYYIHWVKQRTEQGLEWIGRIDPENDETKYGPIFQGRATITADTSSNTVYLQLSSLTSEDTAVYYCAFRGGVYWGPGTTLTVSSGGGGSGGGGSGGGGSHMDVVMTQSPLTLSVAIGQSASISCKSSQSLLDSDGKTYLNWLLQRPGQSPKRLISLVSKLDSGVPDRFTGSGSGTDFTLRISRVEAEDLGIYYCWQGTHFPGTFGGGTKLEIKTTTPAPRPPTPAPTIASQPLSLRPEACRPAAGGAVHTRGLDFACDIYIWAPLAGTCGVLLLSLVITLYCKRGRKKLLYIFKQPFMRPVQTTQEEDGCSCRFPEEEEGGCELRVKFSRSADAPAYKQGQNQLYNELNLGRREEYDVLDKRRGRDPEMGGKPRRKNPQEGLYNELQKDKMAEAYSEIGMKGERRRGKGHDGLYQGLSTATKDTYDALHMQALPPR

SEQ ID NO: 2161 - protein, 490 aa, Artificial Sequence
  source: /note="Description of Artificial Sequence: Synthetic Chimeric Antigen Receptor sequence"
MALPVTALLLPLALLLHAARPEIQLVQSGAEVKKPGATVKISCKGSGFNIEDYYIHWVQQAPGKGLEWMGRIDPENDETKYGPIFQGRVTITADTSTNTVYMELSSLRSEDTAVYYCAFRGGVYWGQGTTVTVSSGGGGSGGGGSGGGGSGGGGSDVVMTQSPDSLAVSLGERATINCKSSQSLLDSDGKTYLNWLQQKPGQPPKRLISLVSKLDSGVPDRFSGSGSGTDFTLTISSLQAEDVAVYYCWQGTHFPGTFGGGTKVEIKTTTPAPRPPTPAPTIASQPLSLRPEACRPAAGGAVHTRGLDFACDIYIWAPLAGTCGVLLLSLVITLYCKRGRKKLLYIFKQPFMRPVQTTQEEDGCSCRFPEEEEGGCELRVKFSRSADAPAYKQGQNQLYNELNLGRREEYDVLDKRRGRDPEMGGKPRRKNPQEGLYNELQKDKMAEAYSEIGMKGERRRGKGHDGLYQGLSTATKDTYDALHMQALPPR

SEQ ID NO: 2162 - protein, 439 aa, Artificial Sequence
  source: /note="Description of Artificial Sequence: Synthetic Chimeric Antigen Receptor sequence"
MALPVTALLLPLALLLHAARPDIQMTQSPSSLSASVGDRVTITCRASQGIRNNLAWYQQKPGKAPKRLIYAASNLQSGVPSRFTGSGSGTEFTLIVSSLQPEDFATYYCLQHHSYPLTSGGGTKVEIKRTGSTSGSGKPGSGEGSEVQVLESGGGLVQPGGSLRLSCAASGFTFSSYAMSWVRQAPGKGLEWVSAISGSGGSTNYADSVKGRFTISRDNSKNTLYLQMNSLRAEDTAVYYCAGSSGWSEYWGQGTLVTVSSTTTPAPRPPTPAPTIASQPLSLRPEACRPAAGGAVHTRGLDFACDIYIWAPLAGTCGVLLLSLVITLYCKRGRKKLLGGGGSGGGGSKRDHHHHHHQDKKTMMMNEEDDGNGMDELLAVLGYKVRSSEMADVAQKLEQLEVMMSNVQEDDLSQLATETVHYNPAELYTWLDSMLTDLN

SEQ ID NO: 2163 - protein, 446 aa, Artificial Sequence
  source: /note="Description of Artificial Sequence: Synthetic Chimeric Antigen Receptor sequence"
MALPVTALLLPLALLLHAARPDIQMTQSPSSLSASVGDRVTITCRASQGIRNNLAWYQQKPGKAPKRLIYAASNLQSGVPSRFTGSGSGTEFTLIVSSLQPEDFATYYCLQHHSYPLTSGGGTKVEIKRTGSTSGSGKPGSGEGSEVQVLESGGGLVQPGGSLRLSCAASGFTFSSYAMSWVRQAPGKGLEWVSAISGSGGSTNVADSVKGRFTISRDNSKNTLVLQMNSLRAEDTAVYYCAGSSGWSEYWGQGTLVTVSSKRGRKKLLGGGGSGGGGSASRILWHEMWHEGLEEASRLYFGERNVKGMFEVLEPLHAMMERGPQTLKETSFNQAYGRDLMEAQEWCRKYMKSGNVKDLLQAWDLYYHVFRRISKTSTTTPAPRPPTPAPTIASQPLSLRPEACRPAAGGAVHTRGLDFACDIYIWAPLAGTCGVLLLSLVITLYC

SEQ ID NO: 2164 - protein, 446 aa, Artificial Sequence
  source: /note="Description of Artificial Sequence: Synthetic Chimeric Antigen Receptor sequence"
MALPVTALLLPLALLLHAARPDIQMTQSPSSLSASVGDRVTITCRASQGIRNNLAWYQQKPGKAPKRLIYAASNLQSGVPSRFTGSGSGTEFTLIVSSLQPEDFATYYCLQHHSYPLTSGGGTKVEIKRTGSTSGSGKPGSGEGSEVQVLESGGGLVQPGGSLRLSCAASGFTFSSYAMSWVRQAPGKGLEWVSAISGSGGSTNYADSVKGRFTISRDNSKNTLYLQMNSLRAEDTAVYYCAGSSGWSEYWGQGTLVTVSSTTTPAPRPPTPAPTIASQPLSLRPEACRPAAGGAVHTRGLDFACDIYIWAPLAGTCGVLLLSLVITLYCKRGRKKLLGGGGSGGGGSASRILWHEMWHEGLEEASRLYFGERNVKGMFEVLEPLHAMMERGPQTLKETSFNQAYGRDLMEAQEWCRKYMKSGNVKDLLQAWDLYYHVFRRISKTS

SEQ ID NO: 2165 - protein, 456 aa, Artificial Sequence
  source: /note="Description of Artificial Sequence: Synthetic Chimeric Antigen Receptor sequence"
MALPVTALLLPLALLLHAARPDIQMTQSPSSLSASVGDRVTITCRASQGIRNNLAWYQQKPGKAPKRLIYAASNLQSGVPSRFTGSGSGTEFTLIVSSLQPEDFATYYCLQHHSYPLTSGGGTKVEIKRTGSTSGSGKPGSGEGSEVQVLESGGGLVQPGGSLRLSCAASGFTFSSYAMSWVRQAPGKGLEWVSAISGSGGSTNYADSVKGRFTISRDNSKNTLYLQMNSLRAEDTAVYYCAGSSGWSEYWGQGTLVTVSSKRGRKKLLGGGGSGGGSGVQVETISPGDGRTFPKRGQTCVVHYTGMLEDGKKFDSSRDRNKPFKFMLGKQEVIRGWEEGVAQMSVGQRAKLTISPDYAYGATGHPGIIPPHATLVFDVELLKLETSTTTPAPRPPTPAPTIASQPLSLRPEACRPAAGGAVHTRGLDFACDIYIWAPLAGTCGVLLLSLVITLYC

SEQ ID NO: 2166 - protein, 457 aa, Artificial Sequence
  source: /note="Description of Artificial Sequence: Synthetic Chimeric Antigen Receptor sequence"
MALPVTALLLPLALLLHAARPDIQMTQSPSSLSASVGDRVTITCRASQGIRNNLAWYQQKPGKAPKRLIYAASNLQSGVPSRFTGSGSGTEFTLIVSSLQPEDFATYYCLQHHSYPLTSGGGTKVEIKRTGSTSGSGKPGSGEGSEVQVLESGGGLVQPGGSLRLSCAASGFTFSSYAMSWVRQAPGKGLEWVSAISGSGGSTNYADSVKGRFTISRDNSKNTLYLQMNSLRAEDTAVYYCAGSSGWSEYWGQGTLVTVSSTTTPAPRPPTPAPTIASQPLSLRPEACRPAAGGAVHTRGLDFACDIYIWAPLAGTCGVLLLSLVITLYCKRGRKKLLGGGGSGGGGSGVQVETISPGDGRTFPKRGQTCVVHYTGMLEDGKKFDSSRDRNKPFKFMLGKQEVIRGWEEGVAQMSVGQRAKLTISPDYAYGATGHPGIIPPHATLVFDVELLKLETS

SEQ ID NO: 2167 - protein, 464 aa, Artificial Sequence
  source: /note="Description of Artificial Sequence: Synthetic Chimeric Antigen Receptor sequence"
QVQLQQSGGGLVKPGASLKLSCVTSGFTFRKFGMSWVRQTSDKRLEWVASISTGGYNTYYSDNVKGRFTISRENAKNTLYLQMSSLKSEDTALYYCTRGYSSTSYAMDYWGQGTTVTVGGGGSGGGGSGGGGSDIELTQSPASLSVATGEKVTIRCMTSTDIDDDMNWYQQKPGEPPKFLISEGNTLRPGVPSRFSSSGTGTDFVFTIENTLSEDVGDYYCLQSFNVPLTFGDGTKLEKALTTTPAPRPPTPAPTIASQPLSLRPEACRPAAGGAVHTRGLDFACDIYIWAPLAGTCGVLLLSLVITLYCKRGRKKLLYIFKQPFMRPVQTTQEEDGCSCRFPEEEEGGCELRVKFSRSADAPAYQQGQNQLYNELNLGRREEYDVLDKRRGRDPEMGGKPRRKNPQEGLYNELQKDKMAEAYSEIGMKGERRRGKGHDGLYQGLSTATKDTYDALHMQALPPR

SEQ ID NO: 2168 - protein, 482 aa, Artificial Sequence
  source: /note="Description of Artificial Sequence: Synthetic Chimeric Antigen Receptor sequence"
MALPVTALLLPLALLLHAARPDIQMTQSPSSLSASVGDRVTITCRASQGIRNNLAWYQQKPGKAPKRLIYAASNLQSGVPSRFTGSGSGTEFTLIVSSLQPEDFATYYCLQHHSYPLTSGGGTKVEIKGGGGSGGGGSGGGGSEVQVLESGGGLVQPGGSLRLSCAASGFTFSSYAMSWVRQAPGKGLEWVSAISGSGGSTNYADSVKGRFTISRDNSKNTLYLQMNSLRAEDTAVYYCAGSSGWSEYWGQGTLVTVSSTTTPAPRPPTPAPTIASQPLSLRPEACRPAAGGAVHTRGLDFACDIYIWAPLAGTCGVLLLSLVITLYCKRGRKKLLYIFKQPFMRPVQTTQEEDGCSCRFPEEEEGGCELRVKFSRSADAPAYQQGQNQLYNELNLGRREEYDVLDKRRGRDPEMGGKPRRKNPQEGLYNELQKDKMAEAYSEIGMKGERRRGKGHDGLYQGLSTATKDTYDALHMQALPPR

SEQ ID NO: 2169 - protein, 484 aa, Artificial Sequence
  source: /note="Description of Artificial Sequence: Synthetic Chimeric Antigen Receptor sequence"
MVLLVTSLLLCELPHPAFLLIPDIQMTQSPSSLSASVGDRVTITCRASQGIRNNLAWYQQKPGKAPKRLIYAASNLQSGVPSRFTGSGSGTEFTLIVSSLQPEDFATYYCLQHHSYPLTSGGGTKVEIKRTGSTSGSGKPGSGEGSEVQVLESGGGLVQPGGSLRLSCAASGFTFSSYAMSWVRQAPGKGLEWVSAISGSGGSTNYADSVKGRFTISRDNSKNTLYLQMNSLRAEDTAVYYCAGSSGWSEYWGQGTLVTVSSAAAIEVMYPPPYLDNEKSNGTIIHVKGKHLCPSPLFPGPSKPFWVLVVVGGVLACYSLLVTVAFIIFWVRSKRSRLLHSDYMNMTPRRPGPTRKHYQPYAPPRDFAAYRSRVKFSRSADAPAYQQGQNQLYNELNLGRREEYDVLDKRRGRDPEMGGKPRRKNPQEGLYNELQKDKMAEAYSEIGMKGERRRGKGHDGLYQGLSTATKDTYDALHMQALPPR

SEQ ID NO: 2170 - protein, 485 aa, Artificial Sequence
  source: /note="Description of Artificial Sequence: Synthetic Chimeric Antigen Receptor sequence"
MALPVTALLLPLALLLHAARPQVQLQQSGGGLVKPGASLKLSCVTSGFTFRKFGMSWVRQTSDKRLEWVASISTGGYNTYYSDNVKGRFTISRENAKNTLYLQMSSLKSEDTALYYCTRGYSSTSYAMDYWGQGTTVTVGGGGSGGGGSGGGGSDIELTQSPASLSVATGEKVTIRCMTSTDIDDDMNWYQQKPGEPPKFLISEGNTLRPGVPSRFSSSGTGTDFVFTIENTLSEDVGDYYCLQSFNVPLTFGDGTKLEKALTTTPAPRPPTPAPTIASQPLSLRPEACRPAAGGAVHTRGLDFACDIYIWAPLAGTCGVLLLSLVITLYCKRGRKKLLYIFKQPFMRPVQTTQEEDGCSCRFPEEEEGGCELRVKFSRSADAPAYQQGQNQLYNELNLGRREEYDVLDKRRGRDPEMGGKPRRKNPQEGLYNELQKDKMAEAYSEIGMKGERRRGKGHDGLYQGLSTATKDTYDALHMQALPPR

SEQ ID NO: 2171 - protein, 548 aa, Artificial Sequence
  source: /note="Description of Artificial Sequence: Synthetic Chimeric Antigen Receptor sequence"
MVLLVTSLLLCELPHPAFLLIPDIQMTQSPSSLSASVGDRVTITCRASQGIRNNLAWYQQKPGKAPKRLIYAASNLQSGVPSRFTGSGSGTEFTLIVSSLQPEDFATYYCLQHHSYPLTSGGGTKVEIKRTGSTSGSGKPGSGEGSEVQVLESGGGLVQPGGSLRLSCAASGFTFSSYAMSWVRQAPGKGLEWVSAISGSGGSTNYADSVKGRFTISRDNSKNTLYLQMNSLRAEDTAVYYCAGSSGWSEYWGQGTLVTVSSAAAFVPVFLPAKPTTTPAPRPPTPAPTIASQPLSLRPEACRPAAGGAVHTRGLDFACDIYIWAPLAGTCGVLLLSLVITLYCNHRNRSKRSRLLHSDYMNMTPRRPGPTRKHYQPYAPPRDFAAYRSRFSVVKRGRKKLLYIFKQPFMRPVQTTQEEDGCSCRFPEEEEGGCELRVKFSRSADAPAYQQGQNQLYNELNLGRREEYDVLDKRRGRDPEMGGKPRRKNPQEGLYNELQKDKMAEAYSEIGMKGERRRGKGHDGLYQGLSTATKDTYDALHMQALPPR

SEQ ID NO: 2172 - protein, 567 aa, Artificial Sequence
  source: /note="Description of Artificial Sequence: Synthetic Chimeric Antigen Receptor sequence"
MALPVTALLLPLALLLHAARPDIQMTQSPSSLSASVGDRVTITCRASQGIRNNLAWYQQKPGKAPKRLIYAASNLQSGVPSRFTGSGSGTEFTLIVSSLQPEDFATYYCLQHHSYPLTSGGGTKVEIKRTGSTSGSGKPGSGEGSEVQVLESGGGLVQPGGSLRLSCAASGFTFSSYAMSWVRQAPGKGLEWVSAISGSGGSTNYADSVKGRFTISRDNSKNTLYLQMNSLRAEDTAVYYCAGSSGWSEYWGQGTLVRVSSTTTPAPRPPTPAPTIASQPLSLRPEACRPAAGGAVHTRGLDFACDIYIWAPLAGTCGVLLLSLVITLYCKRGRKKLLGGGGSGGGGSSNSYDSSSIKVLKGLDAVRKRPGMYIGDTDDGTGLHHMVFEVVDNAIDEALAGHCKEIIVTIHADNSVSVQDDGRGIPTGIHPEEGVSAAEVIMTVLHAGGKFDDNSYKVSGGLHGVGVSVVNALSQKLELVIQREGKIHRQIYEHGVPQAPLAVTGETEKTGTMVRFWPSLETFTNVTEFEYEILAKRLRELSFLNSGVSIRLRDKRDGKEDHFHYEG

SEQ ID NO: 2173 - protein, 647 aa, Artificial Sequence
  source: /note="Description of Artificial Sequence: Synthetic Chimeric Antigen Receptor sequence"
EVQVLESGGGLVQPGGSLRLSCAASGFTFSSYAMSWVRQAPGKGLEWVSAISGSGGSTNYADSVKGRFTISRDNSKNTLYLQMNSLRAEDTAVYYCAGSSGWSEYWGQGTLVTVSSGGGGSGGGGSGGGGSDIQMTQSPSSLSASVGDRVTITCRASQGIRNNLAWYQQKPGKAPKRLIYAASNLQSGVPSRFTGSGSGTEFTLIVSSLQPEDFATYYCLQHHSYPLTSGGGTKVEIKEPKSPDKTHTCPPCPAPPVAGPSVFLFPPKPKDTLMIARTPEVTCVVVDVSHEDPEVKFNWYVDGVEVHNAKTKPREEQYNSTYRVVSVLTVLHQDWLNGKEYKCKVSNKALPAPIEKTISKAKGQPREPQVYTLPPSRDELTKNQVSLTCLVKGFYPSDIAVEWESNGQPENNYKTTPPVLDSDGSFFLYSKLTVDKSRWQQGNVFSCSVMHEALHNHYTQKSLSLSPGKIYIWAPLAGTCGVLLLSLVITLYCKRGRKKLLYIFKQPFMRPVQTTQEEDGCSCRFPEEEEGGCELRVKFSRSADAPAYQQGQNQLYNELNLGRREEYDVLDKRRGRDPEMGGKPRRKNPQEGLYNELQKDKMAEAYSEIGMKGERRRGKGHDGLYQGLSTATKDTYDALHMQALPPR

SEQ ID NO: 2174 - protein, 650 aa, Artificial Sequence
  source: /note="Description of Artificial Sequence: Synthetic Chimeric Antigen Receptor sequence"
QVQLQQSGGGLVKPGASLKLSCVTSGFTFRKFGMSWVRQTSDKRLEWVASISTGGYNTYYSDNVKGRFTISRENAKNTLYLQMSSLKSEDTALYYCTRGYSSTSYAMDYWGQGTTVTVGGGGSGGGGSGGGGSDIELTQSPASLSVATGEKVTIRCMTSTDIDDDMNWYQQKPGEPPKFLISEGNTLRPGVPSRFSSSGTGTDFVFTIENTLSEDVGDYYCLQSFNVPLTFGDGTKLEKALEPKSPDKTHTCPPCPAPPVAGPSVFLFPPKPKDTLMIARTPEVTCVVVDVSHEDPEVKFNWYVDGVEVHNAKTKPREEQYNSTYRVVSVLTVLHQDWLNGKEYKCKVSNKALPAPIEKTISKAKGQPREPQVYTLPPSRDELTKNQVSLTCLVKGFYPSDIAVEWESNGQPENNYKTTPPVLDSDGSFFLYSKLTVDKSRWQQGNVFSCSVMHEALHNHYTQKSLSLSPGKIYIWAPLAGTCGVLLLSLVITLYCKRGRKKLLYIFKQPFMRPVQTTQEEDGCSCRFPEEEEGGCELRVKFSRSADAPAYQQGQNQLYNELNLGRREEYDVLDKRRGRDPEMGGKPRRKNPQEGLYNELQKDKMAEAYSEIGMKGERRRGKGHDGLYQGLSTATKDTYDALHMQALPPR

SEQ ID NO: 2175 - protein, 672 aa, Artificial Sequence [sequence omitted]

SEQ ID NO: 2176 - protein, 675 aa, Artificial Sequence [sequence omitted]

SEQ ID NO: 2177 - protein, 692 aa, Artificial Sequence
  source: /note="Description of Artificial Sequence: Synthetic Chimeric Antigen Receptor sequence"
MALPVTALLLPLALLLHAARPDIQMTQSPSSLSASVGDRVTITCRASQGIRNNLAWYQQKPGKAPKRLIYAASNLQSGVPSRFTGSGSGTEFTLIVSSLQPEDFATYYCLQHHSYPLTSGGGTKVEIKRTGSTSGSGKPGSGEGSEVQVLESGGGLVQPGGSLRLSCAASGFTFSSYAMSWVRQAPGKGLEWVSAISGSGGSTNYADSVKGRFTISRDNSKNTLYLQMNSLRAEDTAVYYCAGSSGWSEYWGQGTLVTVSSTTTPAPRPPTPAPTIASQPLSLRPEACRPAAGGAVHTRGLDFACDIYIWAPLAGTCGVLLLSLVITLYCKRGRKKLLGGGGSGGGGSAASDEVNLIESRTVVPLNTWVLISNFKVAYNILRRPDGTFNRHLAEYLDRKVTANANPVDGVFSFDVLIDRRINLLSRVYRPAYADQEQPPSILDLEKPVDGDIVPVILFFHGGSFAHSSANSAIYDTLCRRLVGLCKCVVVSVNYRRAPENPYPCAYDDGWIALNWVNSRSWLKSKKDSKVHIFLAGDSSGGNIAHNVALRAGESGIDVLGNILLNPMFGGNERTESEKSLDGKYFVTVRDRDWYWKAFLPEGEDREHPACNPFSPRGKSLEGVSFPKSLVVVAGLDLIRDWQLAYAEGLKKAGQEVKLMHLEKATVGFYLLPNNNHFHNVMDEISAFVNAEC

SEQ ID NO: 2178 - protein, 243 aa, Artificial Sequence; identical to SEQ ID NO: 559
  source: /note="Description of Artificial Sequence: Synthetic Chimeric Antigen Receptor sequence"

SEQ ID NO: 2179 - protein, 422 aa, Artificial Sequence
  source: /note="Description of Artificial Sequence: Synthetic Chimeric Antigen Receptor sequence"
MALPVTALLLPLALLLHAARPEIQLQQSGAELVKPGASVKLSCTGSGFNIEDYYIHWVKQRTEQGLEWIGRIDPENDETKYGPIFQGRATITADTSSNTVYLQLSSLTSEDTAVYYCAFRGGVYWGPGTTLTVSSGGGGSGGGGSGGGGSHMDVVMTQSPLTLSVAIGQSASISCKSSQSLLDSDGKTYLNWLLQRPGQSPKRLISLVSKLDSGVPDRFTGSGSGTDFTLRISRVEAEDLGIYYCWQGTHFPGTFGGGTKLEIQTLYCKRGRKKLLYIFKQPFMRPVQTTQEEDGCSCRFPEEEEGGCELRVKFSRSADAPAYKQGQNQLYNELNLGRREEYDVLDKRRGRDPEMGGKPRRKNPQEGLYNELQKDKMAEAYSEIGMKGERRRGKGHDGLYQGLSTATKDTYDALHMQALPPR

SEQ ID NO: 2180 - protein, 490 aa, Artificial Sequence
  source: /note="Description of Artificial Sequence: Synthetic Chimeric Antigen Receptor sequence"
MALPVTALLLPLALLLHAARPEIQLVQSSAEVKKPSATVKISCKSSSFNIEDYYIHWVQQAPGKGLEWMGRIDPENDETKYGPIFQGRVTITADTSTNTVYMELSSLRSEDTAVYYCAFRGGVYWGQGTTVTVSSGGGGSGGGGSGGGGSGGGGSDVVMTQSPLSLPVTLGQPASISCKSSQSLLDSDGKTYLNWLQQRPGQSPRRLISLVSKLDSGVPDRFSGSGSGTDFTLKISRVEAEDVGVYYCWQGTHFPGTFGGGTKVEIKTTTPAPRPPTPAPTIASQPLSLRPEACRPAAGGAVHTRGLDFACDIYIWAPLAGTCGVLLLSLVITLYCKRGRKKLLYIFKQPFMRPVQTTQEEDGCSCRFPEEEEGGCELRVKFSRSADAPAYKQGQNQLYNELNLGRREEYDVLDKRRGRDPEMGGKPRRKNPQEGLYNELQKDKMAEAYSEIGMKGERRRGKGHDGLYQGLSTATKDTYDALHMQALPPR

SEQ ID NO: 2181 - protein, 491 aa, Artificial Sequence
  source: /note="Description of Artificial Sequence: Synthetic Chimeric Antigen Receptor sequence"
MALPVTALLLPLALLLHAARPDVVMTQSPLSLPVTLGQPASISCKSSCISLLDSDGKTYLNWLQQRPGQSPRRLISLVSKLDSGVPDRFSGSGSGTDFTLKISRVEAEDVGVYYCWQGTHFPGTFGGGTKVEIKGGGGSGGGGSGGGGSGGGGSEIQLVQSGAEVKKPGATVKISCKGSGFNIEDYYIHWVQQAPGKGLEWMGRIDPENDETKYGPIFQGRVTITADTSTNTVYMELSSLRSEDTAVYYCAFRGGVYWGQGTTVTVSSTTTPAPRPPTPAPTIASQPLSLRPEACRPAAGGAVHTRGLDFACDIYIWAPLAGTCGVLLLSLVITLYCKRGRKKLLYIFKQPFMRPVQTTQEEDGCSCRFPEEEEGGCELRVKFSRSADAPAYKQGQNQLYNELNLGRREEYDVLDKRRGRDPEMGGKPRRKNPQEGLYNELQKDKMAEAYSEIGMKGERRRGKGHDGLYQGLSTATKDTYDALHMQALPPR

SEQ ID NO: 2182 - protein, 240 aa, Artificial Sequence; identical to SEQ ID NO: 511
  source: /note="Description of Artificial Sequence: Synthetic Chimeric Antigen Receptor sequence"

SEQ ID NO: 2183 - protein, 1347 aa, Artificial Sequence
  source: /note="Description of Artificial Sequence: Synthetic Chimeric Antigen Receptor sequence"
QVQLVESGPGVVQPGRSLRISCAVSGFSVTNYGVHWVRQPPGKGLEWLGVRWAGGITNYNSAFMSRLTISKDNSKNTVYLQMNSLRAEDTAMYYCASRGGHYGYALDYWGQGTLVTVSSASTKGPSVFPLAPSSKSTSGGTAALGCLVKDYFPEPVTVSWNSGALTSGVHTFPAVLQSSGLYSLSSVVTVPSSSLGTQTYICNVNHKPSNTKVDKRVEPKSCDKTHTCPPCPAPELLGGPSVFLFPPKPKDTLMISRTPEVTCVVVDVSHEDPEVKFNWYVDGVEVHNAKTKPREEQYNSTYRVVSVLTVLHQDWLNGKEYKCKVSNKALPAPIEKTISKAKGQPREPQVYTLPPSRDELTKNQVSLTCLVKGFYPSDIAVEWESNGQPENNYKTTPPVLDSDGSFFLYSKLTVDKSRWQQGNVFSCSVMHEALHNHYTQKSLSLSPGKGSTSGSGKPGSSEGSTKGEIVMTQTPATLSVSAGERVTITCKASQSVSNDVTWYQQKPGQAPRLLIYSASNRYSGVPARFSGSGYGTEFTFTISSVQSEDFAVYFCQQDYSSFGQGTKLEIKRTVAAPSVFIFPPSDEQLKSGTASVVCLLNNFYPREAKVQWKVDNALQSGNSQESVTEQDSKDSTYSLSSTLTLSKADYEKHKVYACEVTHQGLSSPVTKSFNRGECGSTSGSGKPGSSEGSTKGFWVLVVVGGVLACYSLLVTVAFIIFWVKRGRKKLLYIFKQPFMRPVQTTQEEDGCSCRFPEEEEGGCELQRRKYRSNKGESPVEPAEPCHYSCPREEEGSTIPIQEDYRKPEPACSPGSTSGSGKPGSSEGSTKGRVKFSRSADAPAYKQGQNQLYNELNLGRREEYDVLDKRRGRDPEMGGKPRRKNPQEGLYNELQKDKMAEAYSEIGMKGERRRGKGHDGLYQGLSTATKDTYDALHMQALPPRGSTSGSGKPGSSEGSTKGVGALESLRGNADLAYILSMEPCGHCLIINNVNFCRESGLRTRTGSNIDCEKLRRRFSSLHFMVEVKGDLTAKKMVLALLELAQQDHGALDCCVVVILSHGCQASHLQFPGAVYGTDGCPVSVEKIVNIFNGTSCPSLGGKPKLFFIQACGGEQKDHGFEVASTSPEDESPGSNPEPDATPFQEGLRTFDQLDAISSLPTPSDIFVSYSTFPGFVSWRDPKSGSWYVETLDDIFEQWAHSEDLQSLLLRVANAVSVKGIYKQMPGCFNFLRKKLFFKTSMGVQVETISPGDGRTFPKRGQTCVVHYTGMLEDGKKVDSSRDRNKPFKFMLGKQEVIRGWEEGVAQMSVGQRAKLTISPDYAYGATGHPGIIPPHATLVFDVELLKLE

SEQ ID NO: 2184 - protein, 484 aa, Artificial Sequence; identical to SEQ ID NO: 2151
  source: /note="Description of Artificial Sequence: Synthetic polypeptide"

SEQ ID NO: 2185 - protein, 504 aa, Artificial Sequence
  source: /note="Description of Artificial Sequence: Synthetic Chimeric Antigen Receptor sequence"
MALPVTALLLPLALLLHAARPGSSRAAQPAMAQVQLQQSGAELVKPGASVKISCKASGYSFTGYFMNWVKQSHGKSLEWIGRIHPYDGDTFYNQNFKDKATLTVDKSSNTAHMELLSLTSEDFAVYYCTRYDGSRAMDYWGQGTTVTVSSGGGGSGGGGSGGGGSDIELTQSPASLAVSLGQRAIISCKASQSVSFAGTSLMHWYHQKPGQQPKLLIYRASNLEAGVPTRFSGSGSKTDFTLNIHPVEEEDAATYYCQQSREYPYTFGGGTKLEIKRAAASTTTPAPRPPTPAPTIASQPLSLRPEACRPAAGGAVHTRGLDFACDIYIWAPLAGTCGVLLLSLVITLYCKRGRKKLLYIFKQPFMRPVQTTQEEDGCSCRFPEEEEGGCELRVKFSRSADAPAYKQGQNQLYNELNLGRREEYDVLDKRRGRDPEMGGKPRRKNPQEGLYNELQKDKMAEAYSEIGMKGERRRGKGHDGLYQGLSTATKDTYDALHMQALPPR

SEQ ID NO: 2186 - protein, 491 aa, Artificial Sequence
  source: /note="Description of Artificial Sequence: Synthetic Chimeric Antigen Receptor sequence"
MALPVTALLLPLALLLHAARPGSQLVESGGGLVQPGRSLRLSCTTSGFTFGDYAMIWARQAPGKGLEWVSSISSSSSYIYYADSVKGRFTISRDNAKNSLYLQMNSLRAEDTAVYYCARERYDFWSGMDVWGKGTTVTVSSGGGGSGGGGSGGSAQSALTQPASVSGSPGQSITISCTGTSSDVGSYNLVSWYQQHPGKAPKLMIYEGSKRPSGVSNRFSGSKSGNAASLTISGLQAEDEADYYCQSYDSSLSVVFGGGTKLTVLGASTTTPAPRPPTPAPTIASQPLSLRPEACRPAAGGAVHTRGLDFACDIYIWAPLAGTCGVLLLSLVITLYCKRGRKKLLYIFKQPFMRPVQTTQEEDGCSCRFPEEEEGGCELRVKFSRSADAPAYKQGQNQLYNELNLGRREEYDVLDKRRGRDPEMGGKPRRKNPQEGLYNELQKDKMAEAYSEIGMKGERRRGKGHDGLYQGLSTATKDTYDALHMQALPPR

SEQ ID NO: 2187 - protein, 450 aa, Artificial Sequence
  source: /note="Description of Artificial Sequence: Synthetic Chimeric Antigen Receptor sequence"
MALPVTALLLPLALLLHAARPGSAEVQLVQSGAEVKKPGASVKVSCKASGYTFTSYAMHWVRQAPGQRLEWMGWINAGNGNTKYSQKFQGRVTITRDTSASTAYMELSSLRSEDTAVYYCARDISYGSFDYWGQGTLVTVSSGGGGSGGGGSGGGGSSSELTQDPAVSVALGQTVRITCQGDNLRSYYASWYRQKSGQAPVLVIYGKNNRPSGIPDRFSGSSSGNTASLTITAAQAEDEADYYCHSRKSRGNHLLFGGGTKLTVLGQASTTTPAPRPPTPAPTIASQPLSLRPEACRPAAGGAVHTRGLDFACDIYIWAPLAGTCGVLLLSLVITLYCRVKFSRSADAPAYQQGQNQLYNELNLGRREEYDVLDKRRGRDPEMGGKPRRKNPQEGLYNELQKDKMAEAYSEIGMKGERRRGKGHDGLYQGLSTATKDTYDALHMQALPPR

SEQ ID NO: 2188 - protein, 450 aa, Artificial Sequence
  source: /note="Description of Artificial Sequence: Synthetic Chimeric Antigen Receptor sequence"
MALPVTALLLPLALLLHAARPGSAEVQLVQSGAEVKKPGASVKVSCKASGYTFTSYAMHWVRQAPGQRLEWMGWINAGNGNTKYSQKFQGRVTITRDTSASTAYMELSSLRSEDTAVYYCARDISYGSFDYWGQGTLVTVSSGGGGSGGGGSGGGGSSSELTQDPAVSVALGQTVRITCQGDSLRSNYANWYQQKPGQAPVLVIYGQNNRPSGIPDRFSGSSSGNTASLTITGAQAADEADYYCDSRVSTGNHVVFGGGTKLTVLGQASTTTPAPRPPTPAPTIASQPLSLRPEACRPAAGGAVHTRGLDFACDIYIWAPLAGTCGVLLLSLVITLYCRVKFSRSADAPAYQQGQNQLYNELNLGRREEYDVLDKRRGRDPEMGGKPRRKNPQEGLYNELQKDKMAEAYSEIGMKGERRRGKGHDGLYQGLSTATKDTYDALHMQALPPR

SEQ ID NO: 2189 - protein, 466 aa, Artificial Sequence
  source: /note="Description of Artificial Sequence: Synthetic Chimeric Antigen Receptor sequence"
DAVVTQESALTSSPGETVTLTCRSSTGAVTISNVASWVQEKPDHLFTGLIGGTNNRAPGVPARFSGSLIGDKAALTITGAQTEDEAIYFCVLWYSDHWVFGGGTKLTVLGGGGGSGGGGSGGGGSGGGGSDVQLQESGPGLVAPSQSLSITCTVSGFLLTDVGVNWVRQSPGKGLEWLGVIWGDGITDYNSALKSRLSVTKDNSKSQVFLKMNSLQSGDSARVYCVTGLFDYWGQGTTLTVSSTTTPAPRPPTPAPTIASQPLSLRPEACRPAAGGAVHTRGLDFACDIYIWAPLAGTCGVLLLSLVITLVCKRGRKKLLYIFKQPFMRPVQTTQEEDGCSCRFPEEEEGGCELRVKFSRSADAPAYKQGQNQLYNELNLGRREEYDVLDKRRGRDPEMGGKPRRKNPQEGLYNELQKDKMAEAVSEIGMKGERRRGKGHDGLYQGLSTATKDTYDALHMQALPPR

SEQ ID NO: 2190 - protein, 492 aa, Artificial Sequence
  source: /note="Description of Artificial Sequence: Synthetic Chimeric Antigen Receptor sequence"
MALPVTALLLPLALLLHAARPGSAEVQLVQSGAEVKKPGASVKVSCKASGYTFTSYAMHWVRQAPGQRLEWMGWINAGNGNTKYSQKFQGRVTITRDTSASTAYMELSSLRSEDTAVYYCARDISYGSFDYWGQGTLVTVSSGGGGSGGGGSGGGGSSSELTQDPAVSVALGQTVRITCQGDSLRSNYANWYQQKPGQAPVLVIYGQNNRPSGIPDRFSGSSSGNTASLTITGAQAADEADYYCDSRVSTGNHVVFGGGTKLTVLGQASTTTPAPRPPTPAPTIASQPLSLRPEACRPAAGGAVHTRGLDFACDIYIWAPLAGTCGVLLLSLVITLYCRVGRKKLLYIFKQPFMRPVQTTQEEDGCSCRFPEEEEGGCELRVKFSRSADAPAYQQGQNQLYNELNLGRREEYDVLDKRRGRDPEMGGKPRRKNPQEGLYNELQKDKMAEAYSEIGMKGERRRGKGHDGLYQGLSTATKDTYDALHMQALPPR

SEQ ID NO: 2191 - protein, 496 aa, Artificial Sequence
  source: /note="Description of Artificial Sequence: Synthetic Chimeric Antigen Receptor sequence"
MALPVTALLLPLALLLHAARPGSAEVQLVQSGAEVKKPGASVKVSCKASGYTFTSYAMHWVRQAPGQRLEWMGWINAGNGNTKYSQKFQGRVTITRDTSASTAYMELSSLRSEDTAVYYCARDISYGSFDYWGQGTLVTVSSGGGGSGGGGSGGGGSSSELTQDPAVSVALGQTVRITCQGDNLRSYYASWYRQKSGQAPVLVIYGKNNRPSGIPDRFSGSSSGNTASLTITAAQAEDEADYYCHSRKSRGNHLLFGGGTKLTVLGQASTTTPAPRPPTPAPTIASQPLSLRPEACRPAAGGAVHTRGLDFACDFWVLVVVGGVLACYSLLVTVAFIIFWVRSKRSRLLHSDYMNMTPRRPGPTRKHYQPYAPPRDFAAYRSIDRVKFSRSADAPAYQQGQNQLYNELNLGRREEYDVLDKRRGRDPEMGGKPRRKNPQEGLYNELQKDKMAEAYSEIGMKGERRRGKGHDGLYQGLSTATKDTYDALHMQALPPR

SEQ ID NO: 2192 - protein, 496 aa, Artificial Sequence
  source: /note="Description of Artificial Sequence: Synthetic Chimeric Antigen Receptor sequence"
MALPVTALLLPLALLLHAARPGSAEVQLVQSGAEVKKPGASVKVSCKASGYTFTSYAMHWVRQAPGQRLEWMGWINAGNGNTKYSQKFQGRVTITRDTSASTAYMELSSLRSEDTAVYYCARDISYGSFDYWGQGTLVTVSSGGGGSGGGGSGGGGSSSELTQDPAVSVALGQTVRITCQGDSLRSNYANWYQQKPGQAPVLVIYGQNNRPSGIPDRFSGSSSGNTASLTITGAQAADEADYYCDSRVSTGNHVVFGGGTKLTVLGQASTTTPAPRPPTPAPTIASQPLSLRPEACRPAAGGAVHTRGLDFACDFWVLVVVGGVLACYSLLVTVAFIIFWVRSKRSRLLHSDYMNMTPRRPGPTRKHYQPYAPPRDFAAYRSIDRVKFSRSADAPAYQQGQNQLYNELNLGRREEYDVLDKRRGRDPEMGGKPRRKNPQEGLYNELQKDKMAEAYSEIGMKGERRRGKGHDGLYQGLSTATKDTYDALHMQALPPR

SEQ ID NO: 2193 - protein, 498 aa, Artificial Sequence
  source: /note="Description of Artificial Sequence: Synthetic Chimeric Antigen Receptor sequence"
MALPVTALLLPLALLLHAARPGSAEVQLVQSGAEVKKPGASVKVSCKASGYTFTSYAMHWVRQAPGQRLEWMGWINAGNGNTKYSQKFQGRVTITRDTSASTAYMELSSLRSEDTAVYYCARDISYGSFDYWGQGTLVTVSSGGGGSGGGGSGGGGSSSELTQDPAVSVALGQTVRITCQGDSLRSNYANWYQQKPGQAPVLVIYGQNNRPSGIPDRFSGSSSGNTASLTITGAQAADEADYYCDSRVSTGNHVVFGGGTKLTVLGQASTTTPAPRPPTPAPTIASQPLSLRPEACRPAAGGAVHTRGLDFACDIYIWAPLAGTCGVLLLSLVITLYCRVRKYRSNKGESPVEPAEPCRYSCPREEEGSTIPIQEDYRKPEPACSPRVKFSRSADAPAYQQGQNQLYNELNLGRREEYDVLDKRRGRDPEMGGKPRRKNPQEGLYNELQKDKMAEAYSEIGMKGERRRGKGHDGLYQGLSTATKDTYDALHMQALPPR

SEQ ID NO: 2194 - protein, 434 aa, Artificial Sequence
  source: /note="Description of Artificial Sequence: Synthetic Chimeric Antigen Receptor sequence"
DAVVTQESALTSSPGETVTLTCRSSTGAVTISNVASWVQEKPDHLFTGLIGGTNNRAPGVPARFSGSLIGDKAALTITGAQTEDEAIYFCVLWYSDHWVFGGGTKLTVLGGGGGSGGGGSGGGGSGGGGSDVQLQESGPGLVAPSQSLSITCTVSGFLLTDVGVNWVRQSPGKGLEWLGVIWGDGITDYNSALKSRLSVTKDNSKSQVFLKMNSLQSGDSARYVCVTGLFDYWGQGTTLTVSSESKVGPPCPPCPDIYIWAPLAGTCGVLLLSLVITLVCKRGRKKLLYIFKQPFMRPVQTTQEEDGCSCRFPEEEEGGCELRVKFSRSADAPAYKQGQNQLYNELNLGRREEYDVLDKRRGRDPEMGGKPRRKNPQEGLYNELQKDKMAEAVSEIGMKGERRRGKGHDGLYQGLSTATKDTYDALHMQALPPR

SEQ ID NO: 2195 - protein, 719 aa, Artificial Sequence
  source: /note="Description of Artificial Sequence: Synthetic Chimeric Antigen Receptor sequence"
METDTLLLWVLLLWVPGSTGQVQLKESGPVLVAPSQTLSITCTVSGFSLASYNIHWVRQPPGKGLEWLGVIWAGGSTNYNSALMSRLSISKDNSKSQVFLQMNSLQTDDTAMYYCAKRSDDYSWFAYWGQGTLVTVSASGGGGSGGGGSGGGGSENVLTQSPAIMSASPGEKVTMTCRASSSVSSSYLHWYQQKSGASPKVWIYSTSNLASGVPGRFSGSGSGTSYSLTISSVEAEDAATYYCQQYSGYPITFGAGTKVEVKRSDPAEPKSPDKTHTCPPCPAPELLGGPSVFLFPPKPKDTLMISRTPEVTCVVVDVSHEDPEVKFNWYVDGVEVHNAKTKPREEQYNSTYRVVSVLTVLHQDWLNGKEYKCKVSNKALPAPIEKTISKAKGQPREPQVYTLPPSRDELTKNQVSLTCLVKGFYPSDIAVEWESNGQPENNYKTTPPVLDSDGSFFLYSKLTVDKSRWQQGNVFSCSVMHEALHNHYTQKSLSLSPGKKDPKFWVLVVVGGVLACYSLLVTVAFIIFWVRSKRSRLLHSDYMNMTPRRPGPTRKHYQPYAPPRDFAAYRSRDQRLPPDAHKPPGGGSFRTPIQEEQADAHSTLAKIRVKFSRSADAPAYQQGQNQLYNELNLGRREEYDVLDKRRGRDPEMGGKPRRKNPQEGLYNELQKDKMAEAYSEIGMKGERRRGKGHDGLYQGLSTATKDTYDALHMQALPPR

SEQ ID NO: 2196 - protein, 157 aa, Artificial Sequence
  source: /note="Description of Artificial Sequence: Synthetic Chimeric Antigen Receptor sequence"
MGTSLLCWMALCLLGADHADACPYSNPSLCSGGGGSELPTQGTFSNVSTNVSPAKPTTTACPYSNPSLCSGGGGSPAPRPPTPAPTIASQPLSLRPEACRPAAGGAVHTRGLDFACDIYIWAPLAGTCGVLLLSLVITLYCNHRNRRRVCKCPRPVV

SEQ ID NO: 2197 - protein, 402 aa, Artificial Sequence
  source: /note="Description of Artificial Sequence: Synthetic Chimeric Antigen Receptor sequence"
MLEGVQVETISPGDGRTFPKRGQTCVVHYTGMLEDGKKVDSSRDRNKPFKFMLGKQEVIRGWEEGVAQMSVGQRAKLTISPDYAYGATGHPGIIPPHATLVFDVELLKLESGGGSGVDGFGDVGALESLRGNADLAYILSMEPCGHCLIINNVNFCRESGLRTRTGSNIDCEKLRRRFSSLHFMVEVKGDLTAKKMVLALLELAQQDHGALDCCVVVILSHGCQASHLQFPGAVYGTDGCPVSVEKIVNIFNGTSCPSLGGKPKLFFIQACGGEQKDHGFEVASTSPEDESPGSNPEPDATPFQEGLRTFDQLDAISSLPTPSDIFVSYSTFPGFVSWRDPKSGSWYVETLDDIFEQWAHSEDLQSLLLRVANAVSVKGIYKQMPGCFNFLRKKLFFKTSAS

SEQ ID NO: 2198 - protein, 422 aa, Artificial Sequence
  source: /note="Description of Artificial Sequence: Synthetic Chimeric Antigen Receptor sequence"
DVVMTQSPLSLPVTPGEPASISCRSSQSLVHSNANTYLHWYLQKPGQSPQLLIYKVSNRFSGVPDRFSGSGSGTDFTLKISRVEAEDVGVYYCSQNTHVPPTFGQGTKLEIKRGGGGSGGGGSGGGGSQVQLVQSGAEVKKPGASVKVSCKASGYTFTDYEMHWVRQAPGQGLEWMGALDPKTGDTAYSQKFKGRVTLTADESTSTAYMELSSLRSEDTAVYYCTRFYSYTYWGQGTLVTVSSTTTPAPRPPTPAPTIASQPLSLRPEACRPAAGGAVHTRGLDFACDIYIWAPLAGTCGVLLLSLVITRVKFSRSADAPAYQQGQNQLYNELNLGRREEYDVLDKRRGRDPEMGGKPQRRKNPQEGLYNELQKDKMAEAYSEIGMKGERRRGKGHDGLYQGLSTATKDTYDALHMQALPPR

SEQ ID NO: 2199 - protein, 456 aa, Artificial Sequence
  source: /note="Description of Artificial Sequence: Synthetic Chimeric Antigen Receptor sequence"
MALPVTALLLPLALLLHAARPDVQLVESGGGLVQPGGSRKLSCAASGFTFSNFGMHWVRQAPEKGLEWVAYISSGGSSINYADTVKGRFTISRDNPKNTLFLQMTSLRSEDTAIYYCTRGGTGTRSLYYFDYWGQGATLIVGGGGSGGGGSGGGGSDIQMTQITSSLSVSLGDRVIISCRASQDIGNFLNWYQQKPDGSLKLLIYYTSRLQSGVPSRFSGWGSGTDYSLTISNLEEEDIATFFCQQGKTLPYTFGGGTKLEIKGLAVSTISSFFPPGYQIYIWAPLAGTCGVLLLSLVITLYCKRGRKKLLYIFKQPFMRPVQTTQEEDGCSCRFPEEEEGGCELRVKFSRSADAPAYQQGQNQLYNELNLGRREEYDVLDKRRGRDPEMGGKPRRKNPQEGLYNELQKDKMAEAYSEIGMKGERRRGKGHDGLYQGLSTATKDTYDALHMQALPP

SEQ ID NO: 2200 - protein, 501 aa, Artificial Sequence
  source: /note="Description of Artificial Sequence: Synthetic Chimeric Antigen Receptor sequence"
METDTLLLWVLLLWVPGSTGQVQLQESGPGLVKPSQTLSITCTVSGFSLASYNIHWVRQPPGKGLEWLGVIWAGGSTNYNSALMSRLTISKDNSKNQVFLKMSSLTAADTAVYYCAKRSDDYSWFAYWGQGTLVTVSSGGGGSGGGGSGGGGSENQMTQSPSSLSASVGDRVTMTCRASSSVSSSYLHWYQQKSGKAPKVWIYSTSNLASGVPSRFSGSGSGTDYTLTISSLQPEDFATYYCQQYSGYPITFGQGTKVEIKRSDPAEPKSPDKTHTCPPCPKDPKFWVLVVVGGVLACYSLLVTVAFIIFWVRSKRSRLLHSDYMNMTPRRPGPTRKHYQPYAPPRDFAAYRSRDQRLPPDAHKPPGGGSFRTPIQEEQADAHSTLAKIRVKFSRSADAPAYQQGQNQLYNELNLGRREEYDVLDKRRGRDPEMGGKPRRKNPQEGLYNELQKDKMAEAYSEIGMKGERRRGKGHDGLYQGLSTATKDTYDALHMQALPPR

SEQ ID NO: 2201 - protein, 527 aa, Artificial Sequence
  source: /note="Description of Artificial Sequence: Synthetic Chimeric Antigen Receptor sequence"
METDTLLLWVLLLWVPGSTGQVQLQESGPGLVKPSQTLSITCTVSGFSLASYNIHWVRQPPGKGLEWLGVIWAGGSTNYNSALMSRLTISKDNSKNQVFLKMSSLTAADTAVYYCAKRSDDYSWFAYWGQGTLVTVSSGGGGSGGGGSGGGGSENQMTQSPSSLSASVGDRVTMTCRASSSVSSSYLHWYQQKSGKAPKVWIYSTSNLASGVPSRFSGSGSGTDYTLTISSLQPEDFATYYCQQYSGYPITFGQGTKVEIKRSDPTTTPAPRPPTPAPTIASQPLSLRPEACRPAAGGAVHTRGLDFACDIFWVLVVVGGVLACYSLLVTVAFIIFWVRSKRSRLLHSDYMNMTPRRPGPTRKHYQPYAPPRDFAAYRSRDQRLPPDAHKPPGGGSFRTPIQEEQADAHSTLAKIRVKFSRSADAPAYQQGQNQLYNELNLGRREEYDVLDKRRGRDPEMGGKPRRKNPQEGLYNELQKDKMAEAYSEIGMKGERRRGKGHDGLYQGLSTATKDTYDALHMQALPPR

SEQ ID NO: 2202 - protein, 642 aa, Artificial Sequence
  source: /note="Description of Artificial Sequence: Synthetic Chimeric Antigen Receptor sequence"
METDTLLLWVLLLWVPGSTGQVQLQESGPGLVKPSQTLSITCTVSGFSLASYNIHWVRQPPGKGLEWLGVIWAGGSTNYNSALMSRLTISKDNSKNQVFLKMSSLTAADTAVYYCAKRSDDYSWFAYWGQGTLVTVSSGGGGSGGGGSGGGGSENQMTQSPSSLSASVGDRVTMTCRASSSVSSSYLHWYQQKSGKAPKVWIYSTSNLASGVPSRFSGSGSGTDYTLTISSLQPEDFATYYCQQYSGYPITFGQGTKVEIKRSDPAEPKSPDKTHTCPPCPAPPVAGPSVFLFPPKPKDTLMIARTPEVTCVVVDVSHEDPEVKFNWYVDGVEVHNAKTKPREEQYNSTYRVVSVLTVLHQDWLNGKEYKCKVSNKALPAPIEKTISKAKGQPREPQVYTLPPSRDELTKNQVSLTCLVKGFYPSDIAVEWESNGQPENNYKTTPPVLDSDGSFFLYSKLTVDKSRWQQGNVFSCSVMHEALHNHYTQKSLSLSPGKKDPKFWVLVVVGGVLACYSLLVTVAFIIFWVRSRVKFSRSADAPAYQQGQNQLYNELNLGRREEYDVLDKRRGRDPEMGGKPRRKNPQEGLYNELQKDKMAEAYSEIGMKGERRRGKGHDGLYQGLSTATKDTYDALHMQALPPR

SEQ ID NO: 2203 - protein, 681 aa, Artificial Sequence
  source: /note="Description of Artificial Sequence: Synthetic Chimeric Antigen Receptor sequence"
METDTLLLWVLLLWVPGSTGQVQLQESGPGLVKPSQTLSITCTVSGFSLASYNIHWVRQPPGKGLEWLGVIWAGGSTNYNSALMSRLTISKDNSKNQVFLKMSSLTAADTAVYYCAKRSDDYSWFAYWGQGTLVTVSSGGGGSGGGGSGGGGSENQMTQSPSSLSASVGDRVTMTCRASSSVSSSYLHWYQQKSGKAPKVWIYSTSNLASGVPSRFSGSGSGTDYTLTISSLQPEDFATYYCQQYSGYPITFGQGTKVEIKRSDPAEPKSPDKTHTCPPCPAPPVAGPSVFLFPPKPKDTLMIARTPEVTCVVVDVSHEDPEVKFNWYVDGVEVHNAKTKPREEQYNSTYRVVSVLTVLHQDWLNGKEYKCKVSNKALPAPIEKTISKAKGQPREPQVYTLPPSRDELTKNQVSLTCLVKGFYPSDIAVEWESNGQPENNYKTTPPVLDSDGSFFLYSKLTVDKSRWQQGNVFSCSVMHEALHNHYTQKSLSLSPGKKDPKFWVLVVVGGVLACYSLLVTVAFIIFWVRSKRSRLLHSDYMNMTPRRPGPTRKHYQPYAPPRDFAAYRSRVKFSRSADAPAYQQGQNQLYNELNLGRREEYDVLDKRRGRDPEMGGKPRRKNPQEGLYNELQKDKMAEAYSEIGMKGERRRGKGHDGLYQGLSTATKDTYDALHMQALPPR

SEQ ID NO: 2204 - protein, 717 aa, Artificial Sequence
  source: /note="Description of Artificial Sequence: Synthetic Chimeric Antigen Receptor sequence"
METDTLLLWVLLLWVPGSTGQVQLQESGPGLVKPSQTLSITCTVSGFSLASYNIHWVRQPPGKGLEWLGVIWAGGSTNYNSALMSRLTISKDNSKNQVFLKMSSLTAADTAVYYCAKRSDDYSWFAYWGQGTLVTVSSGGGGSGGGGSGGGGSENQMTQSPSSLSASVGDRVTMTCRASSSVSSSYLHWYQQKSGKAPKVWIYSTSNLASGVPSRFSGSGSGTDYTLTISSLQPEDFATYYCQQYSGYPITFGQGTKVEIKRSDPAEPKSPDKTHTCPPCPAPPVAGPSVFLFPPKPKDTLMIARTPEVTCVVVDVSHEDPEVKFNWYVDGVEVHNAKTKPREEQYNSTYRVVSVLTVLHQDWLNGKEYKCKVSNKALPAPIEKTISKAKGQPREPQVYTLPPSRDELTKNQVSLTCLVKGFYPSDIAVEWESNGQPENNYKTTPPVLDSDGSFFLYSKLTVDKSRWQQGNVFSCSVMHEALHNHYTQKSLSLSPGKKDPKFWVLVVVGGVLACYSLLVTVAFIIFWVRSKRSRLLHSDYMNMTPRRPGPTRKHYQPYAPPRDFAAYRSRDQRLPPDAHKPPGGGSFRTPIQEEQADAHSTLAKIRVKFSRSADAPAYQQGQNQLYNELNLGRREEYDVLDKRRGRDPEMGGKPRRKNPQEGLYNELQKDKMAEAYSEIGMKGERRRGKGHDGLYQGLSTATKDTYDALHMQALPPR

SEQ ID NO: 2205 - protein, 718 aa, Artificial Sequence
  source: /note="Description of Artificial Sequence: Synthetic Chimeric Antigen Receptor sequence"
METDTLLLWVLLLWVPGSTGQVQLQESGPGLVKPSQTLSITCTVSGFSLASYNIHWVRQPPGKGLEWLGVIWAGGSTNYNSALMSRLTISKDNSKNQVFLKMSSLTAADTAVYYCAKRSDDYSWFAYWGQGTLVTVSSGGGGSGGGGSGGGGSENQMTQSPSSLSASVGDRVTMTCRASSSVSSSYLHWYQQKSGKAPKVWIYSTSNLASGVPSRFSGSGSGTDYTLTISSLQPEDFATYYCQQYSGYPITFGQGTKVEIKRSDPAEPKSPDKTHTCPPCPAPELLGGPSVFLFPPKPKDTLMISRTPEVTCVVVDVSHEDPEVKFNWYVDGVEVHNAKTKPREEQYNSTYRVVSVLTVLHQDWLNGKEYKCKVSNKALPAPIEKTISKAKGQPREPQVYTLPPSRDELTKNQVSLTCLVKGFYPSDIAVEWESNGQPENNYKTTPPVLDSDGSFFLYSKLTVDKSRWQQGNVFSCSVMHEALHNHYTQKSLSLSPGKKDPKFWVLVVVGGVLACYSLLVTVAFIIFWVRSKRSRLLHSDYMNMTPRRPGPTRKHYQPYAPPRDFAAYRSRDQRLPPDAHKPPGGGSFRTPIQEEQADAHSTLAKIRVKFSRSADAPAYQQGQNQLYNELNLGRREEYDVLDKRRGRDPEMGGKPRRKNPQEGLYNELQKDKMAEAYSEIGMKGERRRGKGHDGLYQGLSTATKDTYDALHMQALPPR

SEQ ID NO: 2206 - protein, 858 aa, Artificial Sequence
  source: /note="Description of Artificial Sequence: Synthetic Chimeric Antigen Receptor sequence"
MGTSLLCWMALCLLGADHADACPYSNPSLCSGGGGSELPTQGTFSNVSTNVSPAKPTTTACPYSNPSLCSGGGGSPAPRPPTPAPTIASQPLSLRPEACRPAAGGAVHTRGLDFACDIYIWAPLAGTCGVLLLSLVITLYCNHRNRRRVCKCPRPVVRAEGRGSLLTCGDVEENPGPMETDTLLLWVLLLWVPGSTGQVQLQESGPGLVKPSQTLSITCTVSGFSLASYNIHWVRQPPGKGLEWLGVIWAGGSTNYNSALMSRLTISKDNSKNQVFLKMSSLTAADTAVYYCAKRSDDYSWFAYWGQGTLVTVSSGGGGSGGGGSGGGGSENQMTQSPSSLSASVGDRVTMTCRASSSVSSSYLHWYQQKSGKAPKVWIYSTSNLASGVPSRFSGSGSGTDYTLTISSLQPEDFATYYCQQYSGYPITFGQGTKVEIKRSDPAEPKSPDKTHTCPPCPAPPVAGPSVFLFPPKPKDTLMIARTPEVTCVVVDVSHEDPEVKFNWYVDGVEVHNAKTKPREEQYNSTYRVVSVLTVLHQDWLNGKEYKCKVSNKALPAPIEKTISKAKGQPREPQVYTLPPSRDELTKNQVSLTCLVKGFYPSDIAVEWESNGQPENNYKTTPPVLDSDGSFFLYSKLTVDKSRWQQGNVFSCSVMHEALHNHYTQKSLSLSPGKKDPKFWVLVVVGGVLACYSLLVTVAFIIFWVRSKRSRLLHSDYMNMTPRRPGPTRKHYQPYAPPRDFAAYRSRVKFSRSADAPAYQQGQNQLYNELNLGRREEYDVLDKRRGRDPEMGGKPRRKNPQEGLYNELQKDKMAEAYSEIGMKGERRRGKGHDGLYQGLSTATKDTYDALHMQALPPR

SEQ ID NO: 2207 - protein, 892 aa, Artificial Sequence
  source: /note="Description of Artificial Sequence: Synthetic Chimeric Antigen Receptor sequence"
QVQLVESGPGVVQPGRSLRISCAVSGFSVTNYGVHWVRQPPGKGLEWLGVIWAGGITNYNSAFMSRLTISKDNSKNTVYLQMNSLRAEDTAMYYCASRGGHYGYALDYWGQGTLVTVSSGSTSGSGKPGSSEGSTKGEIVMTQTPATLSVSAGERVTITCKASQSVSNDVTWYQQKPGQAPRLLIYSASNRYSGVPARFSGSGYGTEFTFTISSVQSEDFAVYFCQQDYSSFGQGTKLEIKFWVLVVVGGVLACYSLLVTVAFIIFWVKRGRKKLLYIFKQPFMRPVQTTQEEDGCSCRFPEEEEGGCELQRRKYRSNKGESPVEPAEPCHYSCPREEEGSTIPIQEDYRKPEPACSPGSTSGSGKPGSSEGSTKGRVKFSRSADAPAYKQGQNQLYNELNLGRREEYDVLDKRRGRDPEMGGKPRRKNPQEGLYNELQKDKMAEAYSEIGMKGERRRGKGHDGLYQGLSTATKDTYDALHMQALPPRGSTSGSGKPGSSEGSTKGVGALESLRGNADLAYILSMEPCGHCLIINNVNFCRESGLRTRTGSNIDCEKLRRRFSSLHFMVEVKGDLTAKKMVLALLELAQQDHGALDCCVVVILSHGCQASHLQFPGAVYGTDGCPVSVEKIVNIFNGTSCPSLGGKPKLFFIQACGGEQKDHGFEVASTSPEDESPGSNPEPDATPFQEGLRTFDQLDAISSLPTPSDIFVSYSTFPGFVSWRDPKSGSWYVETLDDIFEQWAHSEDLQSLLLRVANAVSVKGIYKQMPGCFNFLRKKLFFKTSMGVQVETISPGDGRTFPKRGQTCVVHYTGMLEDGKKVDSSRDRNKPFKFMLGKQEVIRGWEEGVAQMSVGQRAKLTISPDYAYGATGHPGIIPPHATLVFDVELLKLE

SEQ ID NO: 2208 - protein, 895 aa, Artificial Sequence
  source: /note="Description of Artificial Sequence: Synthetic Chimeric Antigen Receptor sequence"
EVQLVQSGAEVEKPGASVKISCKASGSSFTGYNMNWVRQNIGKSLEWIGAIDPYYGGTSYNQKFKGRATLTVDKSTSTAYMHLKSLRSEDTAVYYCVSGMEYWGQGTSVTVSSGSTSGSGKPGSSEGSTKGDVVMTQTPLSLPVTPGEPASISCRSSQSLVHRNGNTYLHWYLQKPGQSPKLLIHKVSNRFSGVPDRFSGSGSGTDFTLKISRVEAEDLGVYFCSQSTHVPPLTFGAGTKLELKFWVLVVVGGVLACYSLLVTVAFIIFWVKRGRKKLLYIFKQPFMRPVQTTQEEDGCSCRFPEEEEGGCELQRRKYRSNKGESPVEPAEPCHYSCPREEEGSTIPIQEDYRKPEPACSPGSTSGSGKPGSSEGSTKGRVKFSRSADAPAYKQGQNQLYNELNLGRREEYDVLDKRRGRDPEMGGKPRRKNPQEGLYNELQKDKMAEAYSEIGMKGERRRGKGHDGLYQGLSTATKDTYDALHMQALPPRGSTSGSGKPGSSEGSTKGVGALESLRGNADLAYILSMEPCGHCLIINNVNFCRESGLRTRTGSNIDCEKLRRRFSSLHFMVEVKGDLTAKKMVLALLELAQQDHGALDCCVVVILSHGCQASHLQFPGAVYGTDGCPVSVEKIVNIFNGTSCPSLGGKPKLFFIQACGGEQKDHGFEVASTSPEDESPGSNPEPDATPFQEGLRTFDQLDAISSLPTPSDIFVSYSTFPGFVSWRDPKSGSWYVETLDDIFEQWAHSEDLQSLLLRVANAVSVKGIYKQMPGCFNFLRKKLFFKTSMGVQVETISPGDGRTFPKRGQTCVVHYTGMLEDGKKVDSSRDRNKPFKFMLGKQEVIRGWEEGVAQMSVGQRAKLTISPDYAYGATGHPGIIPPHATLVFDVELLKLE

SEQ ID NO: 2209 - protein, 900 aa, Artificial Sequence
  source: /note="Description of Artificial Sequence: Synthetic Chimeric Antigen Receptor sequence"
EVKLVESGGGLVLPGDSLRLSCATSEFTFTDYYMTWVRQPPRKALEWLGFIRNRANGYTTEYNPSVKGRFTISRDNSQSILYLQMNTLRTEDSATYYCARVSNWAFDYWGQGTTLTVSSGSTSGSGKPGSSEGSTKGDVVMTQTPLSLPVSLGDQASISCRSSQSLLKNNGNTFLHWYLQKSGQSPKLLIYKVSNRLSGVPDRFSGSGSGTYFTLKISRVEAEDLGVYFCSQSTHIPYTFGGGTKLEIKFWVLVVVGGVLACYSLLVTVAFIIFWVKRGRKKLLYIFKQPFMRPVQTTQEEDGCSCRFPEEEEGGCELQRRKYRSNKGESPVEPAEPCHYSCPREEEGSTIPIQEDYRKPEPACSPGSTSGSGKPGSSEGSTKGRVKFSRSADAPAYKQGQNQLYNELNLGRREEYDVLDKRRGRDPEMGGKPRRKNPQEGLYNELQKDKMAEAYSEIGMKGERRRGKGHDGLYQGLSTATKDTYDALHMQALPPRGSTSGSGKPGSSEGSTKGVGALESLRGNADLAYILSMEPCGHCLIINNVNFCRESGLRTRTGSNIDCEKLRRRFSSLHFMVEVKGDLTAKKMVLALLELAQQDHGALDCCVVVILSHGCQASHLQFPGAVYGTDGCPVSVEKIVNIFNGTSCPSLGGKPKLFFIQACGGEQKDHGFEVASTSPEDESPGSNPEPDATPFQEGLRTFDQLDAISSLPTPSDIFVSYSTFPGFVSWRDPKSGSWYVETLDDIFEQWAHSEDLQSLLLRVANAVSVKGIYKQMPGCFNFLRKKLFFKTSMGVQVETISPGDGRTFPKRGQTCVVHYTGMLEDGKKVDSSRDRNKPFKFMLGKQEVIRGWEEGVAQMSVGQRAKLTISPDYAYGATGHPGIIPPHATLVFDVELLKLE

SEQ ID NO: 2210 - protein, 1103 aa, Artificial Sequence
  source: /note="Description of Artificial Sequence: Synthetic Chimeric Antigen Receptor sequence"
MLEGVQVETISPGDGRTFPKRGQTCVVHYTGMLEDGKKVDSSRDRNKPFKFMLGKQEVIRGWEEGVAQMSVGQRAKLTISPDYAYGATGHPGIIPPHATLVFDVELLKLESGGGSGVDGFGDVGALESLRGNADLAYILSMEPCGHCLIINNVNFCRESGLRTRTGSNIDCEKLRRRFSSLHFMVEVKGDLTAKKMVLALLELAQQDHGALDCCVVVILSHGCQASHLQFPGAVYGTDGCPVSVEKIVNIFNGTSCPSLGGKPKLFFIQACGGEQKDHGFEVASTSPEDESPGSNPEPDATPFQEGLRTFDQLDAISSLPTPSDIFVSYSTFPGFVSWRDPKSGSWYVETLDDIFEQWAHSEDLQSLLLRVANAVSVKGIYKQMPGCFNFLRKKLFFKTSASRAEGRGSLLTCGDVEENPGPMETDTLLLWVLLLWVPGSTGQVQLQESGPGLVKPSQTLSITCTVSGFSLASYNIHWVRQPPGKGLEWLGVIWAGGSTNYNSALMSRLTISKDNSKNQVFLKMSSLTAADTAVYYCAKRSDDYSWFAYWGQGTLVTVSSGGGGSGGGGSGGGGSENQMTQSPSSLSASVGDRVTMTCRASSSVSSSYLHWYQQKSGKAPKVWIYSTSNLASGVPSRFSGSGSGTDYTLTISSLQPEDFATYYCQQYSGYPITFGQGTKVEIKRSDPAEPKSPDKTHTCPPCPAPPVAGPSVFLFPPKPKDTLMIARTPEVTCVVVDVSHEDPEVKFNWYVDGVEVHNAKTKPREEQYNSTYRVVSVLTVLHQDWLNGKEYKCKVSNKALPAPIEKTISKAKGQPREPQVYTLPPSRDELTKNQVSLTCLVKGFYPSDIAVEWESNGQPENNYKTTPPVLDSDGSFFLYSKLTVDKSRWQQGNVFSCSVMHEALHNHYTQKSLSLSPGKKDPKFWVLVVVGGVLACYSLLVTVAFIIFWVRSKRSRLLHSDYMNMTPRRPGPTRKHYQPYAPPRDFAAYRSRVKFSRSADAPAYQQGQNQLYNELNLGRREEYDVLDKRRGRDPEMGGKPRRKNPQEGLYNELQKDKMAEAYSEIGMKGERRRGKGHDGLYQGLSTATKDTYDALHMQALPPR

SEQ ID NO: 2211 - protein, 454 aa, Artificial Sequence
  source: /note="Description of Artificial Sequence: Synthetic Chimeric Antigen Receptor sequence"
MALPVTALLLPLALLLHAARPQVQLQQSGGGLVKPGGSLTLSCAASRFTFSTYAMSWVRQTPAKRLEWVAYISSGGASTYYRDSVKGRFTISRDNAKNTLYLQMSSLRSEDTAMYYCARGGSRYAMDYWGQGTTVTVSSGGGGSGGGGSGGGGSDIQLTQSPAILSVSPGERVSFSCWASQSIGTSIHWYQQRTNGSPRLLIKYSSESISGIPSRFSGSGSGTDFTLSINSLESEDIADYYCQQTYSWPFTFGSGTKLEIGLAVSTISSFFPPGYQIYIWAPLAGTCGVLLLSLVITLYCKRGRKKLLYIFKQPFMRPVQTTQEEDGCSCRFPEEEEGGCELRVKFSRSADAPAYQQGQNQLYNELNLGRREEYDVLDKRRGRDPEMGGKPRRKNPQEGLYNELQKDKMAEAYSEIGMKGERRRGKGHDGLYQGLSTATKDTYDALHMQALPPR

SEQ ID NO: 2212 - protein, 456 aa, Artificial Sequence
  source: /note="Description of Artificial Sequence: Synthetic Chimeric Antigen Receptor sequence"
MALPVTALLLPLALLLHAARPEVTLVESGGDFVKPGGSLKVSCAASGFAFSHYAMSWVRQTPAKRLEWVAYISSGGSGTYYSDSVKGRFTISRDNAKNTLYLQMRSLRSEDSAMYFCTRVKLGTYYFDSWGQGTTLTVSSGGGGSGGGGSGGGGSDIQMTQTASSLPASLGDRVTISCSASQDISNYLNWYQQKPDGTVKLLIFYSSNLHSGVPSRFSGGGSGTDYSLTISNLEPEDIATYFCHQYSKLPWTFGGGTKLEIKGLAVSTISSFFPPGYQIYIWAPLAGTCGVLLLSLVITLYCKRGRKKLLYIFKQPFMRPVQTTQEEDGCSCRFPEEEEGGCELRVKFSRSADAPAYQQGQNQLYNELNLGRREEYDVLDKRRGRDPEMGGKPRRKNPQEGLYNELQKDKMAEAYSEIGMKGERRRGKGHDGLYQGLSTATKDTYDALHMQALPPR

SEQ ID NO: 2213 - protein, 459 aa, Artificial Sequence
  source: /note="Description of Artificial Sequence: Synthetic Chimeric Antigen Receptor sequence"
MALPVTALLLPLALLLHAARPEVVVVESGGGFVKPGGSLKLSCAAAGFTFSRYAMSWVRQTPEKRLEWVATISSGGSHTYYPDSVKGRFTISRDNAKNTLYLQMSSLRSEDTAIYYCARPGYDRGAWFFDVWGAGTTVTVSSGGGGSGGGGSGGGGSDIVLTQSPATLSVTPGDSVSLSCRASQIISNNLHWYQQKSHESPRLLIKYASQSISGIPSRFSGSGSGTDFTLSINSVETEDFGMYFCQQSNSWPLTFGSGTKLEIKRGLAVSTISSFFPPGYQIYIWAPLAGTCGVLLLSLVITLYCKRGRKKLLYIFKQPFMRPVQTTQEEDGCSCRFPEEEEGGCELRVKFSRSADAPAYQQGQNQLYNELNLGRREEYDVLDKRRGRDPEMGGKPRRKNPQEGLYNELQKDKMAEAYSEIGMKGERRRGKGHDGLYQGLSTATKDTYDALHMQALPPR

SEQ ID NO: 2214 - protein, 483 aa, Artificial Sequence
  source: /note="Description of Artificial Sequence: Synthetic Chimeric Antigen Receptor sequence"
MALPVTALLLPLALLLHAARPQVQLQQSGGGLVKPGGSLTLSCAASRFTFSTYAMSWVRQTPAKRLEWVAYISSGGASTYYRDSVKGRFTISRDNAKNTLYLQMSSLRSEDTAMYYCARGGSRYAMDYWGQGTTVTVSSGGGGSGGGGSGGGGSDIQLTQSPAILSVSPGERVSFSCWASQSIGTSIHWYQQRTNGSPRLLIKYSSESISGIPSRFSGSGSGTDFTLSINSLESEDIADYYCQQTYSWPFTFGSGTKLEITTTPAPRPPTPAPTIASQPLSLRPEACRPAAGGAVHTRGLDFACDIYIWAPLAGTCGVLLLSLVITLYCKRGRKKLLYIFKQPFMRPVQTTQEEDGCSCRFPEEEEGGCELRVKFSRSADAPAYQQGQNQLYNELNLGRREEYDVLDKRRGRDPEMGGKPRRKNPQEGLYNELQKDKMAEAYSEIGMKGERRRGKGHDGLYQGLSTATKDTYDALHMQALPPR

SEQ ID NO: 2215 - protein, 485 aa, Artificial Sequence
  source: /note="Description of Artificial Sequence: Synthetic Chimeric Antigen Receptor sequence"
MALPVTALLLPLALLLHAARPEVTLVESGGDFVKPGGSLKVSCAASGFAFSHYAMSWVRQTPAKRLEWVAYISSGGSGTYYSDSVKGRFTISRDNAKNTLYLQMRSLRSEDSAMYFCTRVKLGTYYFDSWGQGTTLTVSSGGGGSGGGGSGGGGSDIQMTQTASSLPASLGDRVTISCSASQDISNYLNWYQQKPDGTVKLLIFYSSNLHSGVPSRFSGGGSGTDYSLTISNLEPEDIATYFCHQYSKLPWTFGGGTKLEIKTTTPAPRPPTPAPTIASQPLSLRPEACRPAAGGAVHTRGLDFACDIYIWAPLAGTCGVLLLSLVITLYCKRGRKKLLYIFKQPFMRPVQTTQEEDGCSCRFPEEEEGGCELRVKFSRSADAPAYQQGQNQLYNELNLGRREEYDVLDKRRGRDPEMGGKPRRKNPQEGLYNELQKDKMAEAYSEIGMKGERRRGKGHDGLYQGLSTATKDTYDALHMQALPPR

SEQ ID NO: 2216 - protein, 486 aa, Artificial Sequence
  source: /note="Description of Artificial Sequence: Synthetic Chimeric Antigen Receptor sequence"
MALPVTALLLPLALLLHAARPDVQLVESGGGLVQPGGSRKLSCAASGFTFSNFGMHWVRQAPEKGLEWVAYISSGGSSINYADTVKGRFTISRDNPKNTLFLQMTSLRSEDTAIYYCTRGGTGTRSLYYFDYWGQGATLIVGGGGSGGGGSGGGGSDIQMTQITSSLSVSLGDRVIISCRASQDIGNFLNWYQQKPDGSLKLLIYYTSRLQSGVPSRFSGWGSGTDYSLTISNLEEEDIATFFCQQGKTLPYTFGGGTKLEIKTTTPAPRPPTPAPTIASQPLSLRPEACRPAAGGAVHTRGLDFACDIYIWAPLAGTCGVLLLSLVITLYCKRGRKKLLYIFKQPFMRPVQTTQEEDGCSCRFPEEEEGGCELRVKFSRSADAPAYQQGQNQLYNELNLGRREEYDVLDKRRGRDPEMGGKPRRKNPQEGLYNELQKDKMAEAYSEIGMKGERRRGKGHDGLYQGLSTATKDTYDALHMQALPPR

SEQ ID NO: 2217 - protein, 488 aa, Artificial Sequence
  source: /note="Description of Artificial Sequence: Synthetic Chimeric Antigen Receptor sequence"
MALPVTALLLPLALLLHAARPEVVVVESGGGFVKPGGSLKLSCAAAGFTFSRYAMSWVRQTPEKRLEWVATISSGGSHTYYPDSVKGRFTISRDNAKNTLYLQMSSLRSEDTAIYYCARPGYDRGAWFFDVWGAGTTVTVSSGGGGSGGGGSGGGGSDIVLTQSPATLSVTPGDSVSLSCRASQIISNNLHWYQQKSHESPRLLIKYASQSISGIPSRFSGSGSGTDFTLSINSVETEDFGMYFCQQSNSWPLTFGSGTKLEIKRTTTPAPRPPTPAPTIASQPLSLRPEACRPAAGGAVHTRGLDFACDIYIWAPLAGTCGVLLLSLVITLYCKRGRKKLLYIFKQPFMRPVQTTQEEDGCSCRFPEEEEGGCELRVKFSRSADAPAYQQGQNQLYNELNLGRREEYDVLDKRRGRDPEMGGKPRRKNPQEGLYNELQKDKMAEAYSEIGMKGERRRGKGHDGLYQGLSTATKDTYDALHMQALPPR

SEQ ID NO: 2218 - protein, 669 aa, Artificial Sequence
  source: /note="Description of Artificial Sequence: Synthetic Chimeric Antigen Receptor sequence"
MALPVTALLLPLALLLHAARPQVQLQQSGGGLVKPGGSLTLSCAASRFTFSTYAMSWVRQTPAKRLEWVAYISSGGASTYYRDSVKGRFTISRDNAKNTLYLQMSSLRSEDTAMYYCARGGSRYAMDYWGQGTTVTVSSGGGGSGGGGSGGGGSDIQLTQSPAILSVSPGERVSFSCWASQSIGTSIHWYQQRTNGSPRLLIKYSSESISGIPSRFSGSGSGTDFTLSINSLESEDIADYYCQQTYSWPFTFGSGTKLEIEPKSPDKTHTCPPCPAPPVAGPSVFLFPPKPKDTLMIARTPEVTCVVVDVSHEDPEVKFNWYVDGVEVHNAKTKPREEQYNSTYRVVSVLTVLHQDWLNGKEYKCKVSNKALPAPIEKTISKAKGQPREPQVYTLPPSRDELTKNQVSLTCLVKGFYPSDIAVEWESNGQPENNYKTTPPVLDSDGSFFLYSKLTVDKSRWQQGNVFSCSVMHEALHNHYTQKSLSLSPGKIYIWAPLAGTCGVLLLSLVITLYCKRGRKKLLYIFKQPFMRPVQTTQEEDGCSCRFPEEEEGGCELRVKFSRSADAPAYQQGQNQLYNELNLGRREEYDVLDKRRGRDPEMGGKPRRKNPQEGLYNELQKDKMAEAYSEIGMKGERRRGKGHDGLYQGLSTATKDTYDALHMQALPPR

SEQ ID NO: 2219 - protein, 671 aa, Artificial Sequence
  source: /note="Description of Artificial Sequence: Synthetic Chimeric Antigen Receptor sequence"
MALPVTALLLPLALLLHAARPEVTLVESGGDFVKPGGSLKVSCAASGFAFSHYAMSWVRQTPAKRLEWVAYISSGGSGTYYSDSVKGRFTISRDNAKNTLYLQMRSLRSEDSAMYFCTRVKLGTYYFDSWGQGTTLTVSSGGGGSGGGGSGGGGSDIQMTQTASSLPASLGDRVTISCSASQDISNYLNWYQQKPDGTVKLLIFYSSNLHSGVPSRFSGGGSGTDYSLTISNLEPEDIATYFCHQYSKLPWTFGGGTKLEIKEPKSPDKTHTCPPCPAPPVAGPSVFLFPPKPKDTLMIARTPEVTCVVVDVSHEDPEVKFNWYVDGVEVHNAKTKPREEQYNSTYRVVSVLTVLHQDWLNGKEYKCKVSNKALPAPIEKTISKAKGQPREPQVYTLPPSRDELTKNQVSLTCLVKGFYPSDIAVEWESNGQPENNYKTTPPVLDSDGSFFLYSKLTVDKSRWQQGNVFSCSVMHEALHNHYTQKSLSLSPGKIYIWAPLAGTCGVLLLSLVITLYCKRGRKKLLYIFKQPFMRPVQTTQEEDGCSCRFPEEEEGGCELRVKFSRSADAPAYQQGQNQLYNELNLGRREEYDVLDKRRGRDPEMGGKPRRKNPQEGLYNELQKDKMAEAYSEIGMKGERRRGKGHDGLYQGLSTATKDTYDALHMQALPPR

SEQ ID NO: 2220 - protein, 672 aa, Artificial Sequence
  source: /note="Description of Artificial Sequence: Synthetic Chimeric Antigen Receptor sequence"
MALPVTALLLPLALLLHAARPDVQLVESGGGLVQPGGSRKLSCAASGFTFSNFGMHWVRQAPEKGLEWVAYISSGGSSINYADTVKGRFTISRDNPKNTLFLQMTSLRSEDTAIYYCTRGGTGTRSLYYFDYWGQGATLIVGGGGSGGGGSGGGGSDIQMTQITSSLSVSLGDRVIISCRASQDIGNFLNWYQQKPDGSLKLLIYYTSRLQSGVPSRFSGWGSGTDYSLTISNLEEEDIATFFCQQGKTLPYTFGGGTKLEIKEPKSPDKTHTCPPCPAPPVAGPSVFLFPPKPKDTLMIARTPEVTCVVVDVSHEDPEVKFNWYVDGVEVHNAKTKPREEQYNSTYRVVSVLTVLHQDWLNGKEYKCKVSNKALPAPIEKTISKAKGQPREPQVYTLPPSRDELTKNQVSLTCLVKGFYPSDIAVEWESNGQPENNYKTTPPVLDSDGSFFLYSKLTVDKSRWQQGNVFSCSVMHEALHNHYTQKSLSLSPGKIYIWAPLAGTCGVLLLSLVITLYCKRGRKKLLYIFKQPFMRPVQTTQEEDGCSCRFPEEEEGGCELRVKFSRSADAPAYQQGQNQLYNELNLGRREEYDVLDKRRGRDPEMGGKPRRKNPQEGLYNELQKDKMAEAYSEIGMKGERRRGKGHDGLYQGLSTATKDTYDALHMQALPPR

SEQ ID NO: 2221 - protein, 674 aa, Artificial Sequence
  source: /note="Description of Artificial Sequence: Synthetic Chimeric Antigen Receptor sequence"
MALPVTALLLPLALLLHAARPEVVVVESGGGFVKPGGSLKLSCAAAGFTFSRYAMSWVRQTPEKRLEWVATISSGGSHTYYPDSVKGRFTISRDNAKNTLYLQMSSLRSEDTAIYYCARPGYDRGAWFFDVWGAGTTVTVSSGGGGSGGGGSGGGGSDIVLTQSPATLSVTPGDSVSLSCRASQIISNNLHWYQQKSHESPRLLIKYASQSISGIPSRFSGSGSGTDFTLSINSVETEDFGMYFCQQSNSWPLTFGSGTKLEIKREPKSPDKTHTCPPCPAPPVAGPSVFLFPPKPKDTLMIARTPEVTCVVVDVSHEDPEVKFNWYVDGVEVHNAKTKPREEQYNSTYRVVSVLTVLHQDWLNGKEYKCKVSNKALPAPIEKTISKAKGQPREPQVYTLPPSRDELTKNQVSLTCLVKGFYPSDIAVEWESNGQPENNYKTTPPVLDSDGSFFLYSKLTVDKSRWQQGNVFSCSVMHEALHNHYTQKSLSLSPGKIYIWAPLAGTCGVLLLSLVITLYCKRGRKKLLYIFKQPFMRPVQTTQEEDGCSCRFPEEEEGGCELRVKFSRSADAPAYQQGQNQLYNELNLGRREEYDVLDKRRGRDPEMGGKPRRKNPQEGLYNELQKDKMAEAYSEIGMKGERRRGKGHDGLYQGLSTATKDTYDALHMQALPPR

SEQ ID NO: 2222 - protein, 415 aa, Artificial Sequence
  source: /note="Description of Artificial Sequence: Synthetic Chimeric Antigen Receptor sequence"
MDWIWRILFLVGAATGAHSQVQLQQSGAELVRPGASVKLSCKASGYTFTDYEMHWVKQTPVHGLKWIGALDPKTGDTAYSQKFKGKATLTADKSSSTAYMELRSLTSEDSAVYYCTRFYSYTYWGQGTLVTVSAGGGGSGGGGSGGGGSDVVMTQTPLSLPVSLGDQASISCRSSQSLVHSNGNTYLHWYLQKPGQSPKLLIYKVSNRFSGVPDRFSGSGSGTDFTLKISRVEAEDLGVYFCSQNTHVPPTFGSGTKLEIKEPKSCDKTHTCPPCPDPKFWVLVVVGGVLACYSLLVTVAFIIRVKFSRSADAPAYQQGQNQLYNELNLGRREEYDVLDKRRGRDPEMGGKPRRKNPQEGLYNELQKDKMAEAYSEIGMKGERRRGKGHDGLYQGLSTATKDTYDALHMQALPPR

SEQ ID NO: 2223 - protein, 396 aa, Artificial Sequence
  source: /note="Description of Artificial Sequence: Synthetic Chimeric Antigen Receptor sequence"
QVQLQQSGAELVRPGASVKLSCKASGYTFTDYEMHWVKQTPVHGLKWIGALDPKTGDTAYSQKFKGKATLTADKSSSTAYMELRSLTSEDSAVYYCTRFYSYTYWGQGTLVTVSAGGGGSGGGGSGGGGSDVVMTQTPLSLPVSLGDQASISCRSSQSLVHSNGNTYLHWYLQKPGQSPKLLIYKVSNRFSGVPDRFSGSGSGTDFTLKISRVEAEDLGVYFCSQNTHVPPTFGSGTKLEIKEPKSCDKTHTCPPCPDPKFWVLVVVGGVLACYSLLVTVAFIIRVKFSRSADAPAYQQGQNQLYNELNLGRREEYDVLDKRRGRDPEMGGKPRRKNPQEGLYNELQKDKMAEAYSEIGMKGERRRGKGHDGLYQGLSTATKDTYDALHMQALPPR

SEQ ID NO: 2224 - protein, 438 aa, Artificial Sequence
  source: /note="Description of Artificial Sequence: Synthetic Chimeric Antigen Receptor sequence"
QVQLQQSGAELVRPGASVKLSCKASGYTFTDYEMHWVKQTPVHGLKWIGALDPKTGDTAYSQKFKGKATLTADKSSSTAYMELRSLTSEDSAVYYCTRFYSYTYWGQGTLVTVSAGGGGSGGGGSGGGGSDVVMTQTPLSLPVSLGDQASISCRSSQSLVHSNGNTYLHWYLQKPGQSPKLLIYKVSNRFSGVPDRFSGSGSGTDFTLKISRVEAEDLGVYFCSQNTHVPPTFGSGTKLEIKEPKSCDKTHTCPPCPDPKFWVLVVVGGVLACYSLLVTVAFIIKRGRKKLLYIFKQPFMRPVQTTQEEDGCSCRFPEEEEGGCELRVKFSRSADAPAYQQGQNQLYNELNLGRREEYDVLDKRRGRDPEMGGKPRRKNPQEGLYNELQKDKMAEAYSEIGMKGERRRGKGHDGLYQGLSTATKDTYDALHMQALPPR

SEQ ID NO: 2225 - protein, 440 aa, Artificial Sequence
  source: /note="Description of Artificial Sequence: Synthetic Chimeric Antigen Receptor sequence"
QVQLQQSGAELVRPGASVKLSCKASGYTFTDYEMHWVKQTPVHGLKWIGALDPKTGDTAYSQKFKGKATLTADKSSSTAYMELRSLTSEDSAVYYCTRFYSYTYWGQGTLVTVSAGGGGSGGGGSGGGGSDVVMTQTPLSLPVSLGDQASISCRSSQSLVHSNGNTYLHWYLQKPGQSPKLLIYKVSNRFSGVPDRFSGSGSGTDFTLKISRVEAEDLGVYFCSQNTHVPPTFGSGTKLEIKEPKSCDKTHTCPPCPDPKFWVLVVVGGVLACYSLLVTVAFIIFWVRSKRSRLLHSDYMNMTPRRPGPTRKHYQPYAPPRDFAAYRSRVKFSRSADAPAYQQGQNQLYNELNLGRREEYDVLDKRRGRDPEMGGKPRRKNPQEGLYNELQKDKMAEAYSEIGMKGERRRGKGHDGLYQGLSTATKDTYDALHMQALPPR

SEQ ID NO: 2226 - protein, 457 aa, Artificial Sequence
  source: /note="Description of Artificial Sequence: Synthetic Chimeric Antigen Receptor sequence"
MDWIWRILFLVGAATGAHSQVQLQQSGAELVRPGASVKLSCKASGYTFTDYEMHWVKQTPVHGLKWIGALDPKTGDTAYSQKFKGKATLTADKSSSTAYMELRSLTSEDSAVYYCTRFYSYTYWGQGTLVTVSAGGGGSGGGGSGGGGSDVVMTQTPLSLPVSLGDQASISCRSSQSLVHSNGNTYLHWYLQKPGQSPKLLIYKVSNRFSGVPDRFSGSGSGTDFTLKISRVEAEDLGVYFCSQNTHVPPTFGSGTKLEIKEPKSCDKTHTCPPCPDPKFWVLVVVGGVLACYSLLVTVAFIIKRGRKKLLYIFKQPFMRPVQTTQEEDGCSCRFPEEEEGGCELRVKFSRSADAPAYQQGQNQLYNELNLGRREEYDVLDKRRGRDPEMGGKPRRKNPQEGLYNELQKDKMAEAYSEIGMKGERRRGKGHDGLYQGLSTATKDTYDALHMQALPPR

SEQ ID NO: 2227 - protein, 459 aa, Artificial Sequence
  source: /note="Description of Artificial Sequence: Synthetic Chimeric Antigen Receptor sequence"
MDWIWRILFLVGAATGAHSQVQLQQSGAELVRPGASVKLSCKASGYTFTDYEMHWVKQTPVHGLKWIGALDPKTGDTAYSQKFKGKATLTADKSSSTAYMELRSLTSEDSAVYYCTRFYSYTYWGQGTLVTVSAGGGGSGGGGSGGGGSDVVMTQTPLSLPVSLGDQASISCRSSQSLVHSNGNTYLHWYLQKPGQSPKLLIYKVSNRFSGVPDRFSGSGSGTDFTLKISRVEAEDLGVYFCSQNTHVPPTFGSGTKLEIKEPKSCDKTHTCPPCPDPKFWVLVVVGGVLACYSLLVTVAFIIFWVRSKRSRLLHSDYMNMTPRRPGPTRKHYQPYAPPRDFAAYRSRVKFSRSADAPAYQQGQNQLYNELNLGRREEYDVLDKRRGRDPEMGGKPRRKNPQEGLYNELQKDKMAEAYSEIGMKGERRRGKGHDGLYQGLSTATKDTYDALHMQALPPR

SEQ ID NO: 2228 - protein, 482 aa, Artificial Sequence
  source: /note="Description of Artificial Sequence: Synthetic Chimeric Antigen Receptor sequence"
QVQLQQSGAELVRPGASVKLSCKASGYTFTDYEMHWVKQTPVHGLKWIGALDPKTGDTAYSQKFKGKATLTADKSSSTAYMELRSLTSEDSAVYYCTRFYSYTYWGQGTLVTVSAGGGGSGGGGSGGGGSDVVMTQTPLSLPVSLGDQASISCRSSQSLVHSNGNTYLHWYLQKPGQSPKLLIYKVSNRFSGVPDRFSGSGSGTDFTLKISRVEAEDLGVYFCSQNTHVPPTFGSGTKLEIKEPKSCDKTHTCPPCPDPKFWVLVVVGGVLACYSLLVTVAFIIFWVRSKRSRLLHSDYMNMTPRRPGPTRKHYQPYAPPRDFAAYRSKRGRKKLLYIFKQPFMRPVQTTQEEDGCSCRFPEEEEGGCELRVKFSRSADAPAYQQGQNQLYNELNLGRREEYDVLDKRRGRDPEMGGKPRRKNPQEGLYNELQKDKMAEAYSEIGMKGERRRGKGHDGLYQGLSTATKDTYDALHMQALPPR

SEQ ID NO: 2229 - protein, 501 aa, Artificial Sequence
  source: /note="Description of Artificial Sequence: Synthetic Chimeric Antigen Receptor sequence"
MDWIWRILFLVGAATGAHSQVQLQQSGAELVRPGASVKLSCKASGYTFTDYEMHWVKQTPVHGLKWIGALDPKTGDTAYSQKFKGKATLTADKSSSTAYMELRSLTSEDSAVYYCTRFYSYTYWGQGTLVTVSAGGGGSGGGGSGGGGSDVVMTQTPLSLPVSLGDQASISCRSSQSLVHSNGNTYLHWYLQKPGQSPKLLIYKVSNRFSGVPDRFSGSGSGTDFTLKISRVEAEDLGVYFCSQNTHVPPTFGSGTKLEIKEPKSCDKTHTCPPCPDPKFWVLVVVGGVLACYSLLVTVAFIIFWVRSKRSRLLHSDYMNMTPRRPGPTRKHYQPYAPPRDFAAYRSKRGRKKLLYIFKQPFMRPVQTTQEEDGCSCRFPEEEEGGCELRVKFSRSADAPAYQQGQNQLYNELNLGRREEYDVLDKRRGRDPEMGGKPRRKNPQEGLYNELQKDKMAEAYSEIGMKGERRRGKGHDGLYQGLSTATKDTYDALHMQALPPR

SEQ ID NO: 2230 - DNA, 1380 bp, Artificial Sequence
  source: /note="Description of Artificial Sequence: Synthetic Chimeric Antigen Receptor sequence"
atggattggatttggcgcattctgtttctggtgggagccgcaaccggagcacatagtcaggtccagctgcagcagtcaggagccgaactggtgcggcccggcgcaagtgtcaaactgtcatgcaaggccagcgggtataccttcacagactacgagatgcactgggtgaaacagacccctgtgcacggcctgaagtggatcggcgctctggacccaaaaaccggggatacagcatattcccagaagtttaaaggaaaggccactctgaccgctgacaagagctcctctactgcctacatggagctgaggagcctgacatccgaagatagcgccgtgtactattgcacccgcttctactcctatacatactggggccaggggactctggtgaccgtctctgcaggaggaggaggctctggaggaggagggagtggaggcgggggaagcgacgtggtcatgacacagactccactgtccctgcccgtgagcctgggcgatcaggctagcatttcctgtcgaagttcacagagtctggtgcactcaaacggaaatacctatctgcattggtacctgcagaagccaggccagtctcccaaactgctgatctataaggtgagcaaccggttctccggggtccctgacagattttctggaagtggctcagggacagatttcactctgaaaattagcagagtggaggccgaagatctgggcgtctacttttgtagccagaatacccacgtcccaccaacattcggaagcggcactaaactggaaatcaaggagcccaaatcttgtgacaaaactcacacatgcccaccgtgcccggatccgaaagatcccaaattttgggtgctggtggtggttggtggagtcctggcttgctatagcttgctagtaacagtggcctttattattaaacggggcagaaagaaactcctgtatatattcaaacaaccatttatgagaccagtacaaactactcaagaggaagatggctgtagctgccgatttccagaagaagaagaaggaggatgtgaactgagagtgaagttcagcaggagcgcagacgcccccgcgtaccagcagggccagaaccagctctataacgagctcaatctaggacgaagagaggagtacgatgttttggacaagagacgtggccgggaccctgagatggggggaaagccgagaaggaagaaccctcaggaaggcctgtacaatgaactgcagaaagataagatggcggaggcctacagtgagattgggatgaaaggcgagcgccggaggggcaaggggcacgatggcctttaccagggtctcagtacagccaccaaggacacctacgacgcccttcacatgcaggccctgccccctcgc

SEQ ID NO: 2231 - protein, 464 aa, Artificial Sequence
  source: /note="Description of Artificial Sequence: Synthetic Chimeric Antigen Receptor sequence"
DVVMTQSPLSLPVTPGEPASISCRSSQSLVHSNANTYLHWYLQKPGQSPQLLIYKVSNRFSGVPDRFSGSGSGTDFTLKISRVEAEDVGVYYCSQNTHVPPTFGQGTKLEIKRGGGGSGGGGSGGGGSQVQLVQSGAEVKKPGASVKVSCKASGYTFTDYEMHWVRQAPGQGLEWMGALDPKTGDTAYSQKFKGRVTLTADESTSTAYMELSSLRSEDTAVYYCTRFYSYTYWGQGTLVTVSSTTTPAPRPPTPAPTIASQPLSLRPEACRPAAGGAVHTRGLDFACDIYIWAPLAGTCGVLLLSLVITKRGRKKLLYIFKQPFMRPVQTTQEEDGCSCRFPEEEEGGCELRVKFSRSADAPAYQQGQNQLYNELNLGRREEYDVLDKRRGRDPEMGGKPQRRKNPQEGLYNELQKDKMAEAYSEIGMKGERRRGKGHDGLYQGLSTATKDTYDALHMQALPPR

SEQ ID NO: 2232 - protein, 469 aa, Artificial Sequence
  source: /note="Description of Artificial Sequence: Synthetic Chimeric Antigen Receptor sequence"
DVVMTQSPLSLPVTPGEPASISCRSSQSLVHSNANTYLHWYLQKPGQSPQLLIYKVSNRFSGVPDRFSGSGSGTDFTLKISRVEAEDVGVYYCSQNTHVPPTFGQGTKLEIKRGGGGSGGGGSGGGGSQVQLVQSGAEVKKPGASVKVSCKASGYTFTDYEMHWVRQAPGQGLEWMGALDPKTGDTAYSQKFKGRVTLTADESTSTAYMELSSLRSEDTAVYYCTRFYSYTYWGQGTLVTVSSTTTPAPRPPTPAPTIASQPLSLRPEACRPAAGGAVHTRGLDFACDFWVLVVVGGVLACYSLLVTVAFIIFWVRSKRSRLLHSDYMNMTPRRPGPTRKHYQPYAPPRDFAAYRSRVKFSRSADAPAYQQGQNQLYNELNLGRREEYDVLDKRRGRDPEMGGKPQRRKNPQEGLYNELQKDKMAEAYSEIGMKGERRRGKGHDGLYQGLSTATKDTYDALHMQALPPR

SEQ ID NO: 2233 - protein, 500 aa, Artificial Sequence
  source: /note="Description of Artificial Sequence: Synthetic Chimeric Antigen Receptor sequence"
DIQMTQSPSSLSASVGDRVTITCRASQNIATDVSTAVAWIQQKPGKAPKLLIYSASFLYSGVPSRFSGSGSGTDFTLTISSLQPEDFATYYCQQSEPEPYTFGQGTKVEIKRGSTSGSGKPGSGEGSTKGEVQLVESGGGLVQPGGSLRLSCAASGFTLSGDWVIHWVRQAPGKGLEWVGEISAAGGYTDYADSVKGRFTISADTSKNTAYLQMNSLRAEDTAVYYCARESRVSFEAAMDYWGQGTLVPSDIAVEWESNGQPENNYKTTPPVLDSDGSFFLYSRLTVDKSRWQEGNVFSCSVMHEALHNHYTQKSLSLSLGKWVLVVVGGVLACYSLLVTVAFIIKRGRKKLLYIFKQPFMRPVQTTQEEDGCSCRFPEEEEGGCELRVKFSRSADAPAYQQGQNQLYNELNLGRREEYDVLDKRRGRDPEMGGKPQRRKNPQEGLYNELQKDKMAEAYSEIGMKGERRRGKGHDGLYQGLSTATKDTYDALHMQALPPR

SEQ ID NO: 2234 - protein, 511 aa, Artificial Sequence
  source: /note="Description of Artificial Sequence: Synthetic Chimeric Antigen Receptor sequence"
DVVMTQSPLSLPVTPGEPASISCRSSQSLVHSNANTYLHWYLQKPGQSPQLLIYKVSNRFSGVPDRFSGSGSGTDFTLKISRVEAEDVGVYYCSQNTHVPPTFGQGTKLEIKRGGGGSGGGGSGGGGSQVQLVQSGAEVKKPGASVKVSCKASGYTFTDYEMHWVRQAPGQGLEWMGALDPKTGDTAYSQKFKGRVTLTADESTSTAYMELSSLRSEDTAVYYCTRFYSYTYWGQGTLVTVSSTTTPAPRPPTPAPTIASQPLSLRPEACRPAAGGAVHTRGLDFACDFWVLVVVGGVLACYSLLVTVAFIIFWVRSKRSRLLHSDYMNMTPRRPGPTRKHYQPYAPPRDFAAYRSKRGRKKLLYIFKQPFMRPVQTTQEEDGCSCRFPEEEEGGCELRVKFSRSADAPAYQQGQNQLYNELNLGRREEYDVLDKRRGRDPEMGGKPQRRKNPQEGLYNELQKDKMAEAYSEIGMKGERRRGKGHDGLYQGLSTATKDTYDALHMQALPPR

SEQ ID NO: 2235 - protein, 503 aa, Artificial Sequence
  source: /note="Description of Artificial Sequence: Synthetic Chimeric Antigen Receptor sequence"
DIQMTQSPSSLSASVGDRVTITCRASQNIATDVSTAVAWIQQKPGKAPKLLIYSASFLYSGVPSRFSGSGSGTDFTLTISSLQPEDFATYYCQQSEPEPYTFGQGTKVEIKRGSTSGSGKPGSGEGSTKGEVQLVESGGGLVQPGGSLRLSCAASGFTLSGDWVIHWVRQAPGKGLEWVGEISAAGGYTDYADSVKGRFTISADTSKNTAYLQMNSLRAEDTAVYYCARESRVSFEAAMDYWGQGTLVPSDIAVEWESNGQPENNYKTTPPVLDSDGSFFLYSRLTVDKSRWQEGNVFSCSVMHEALHNHYTQKSLSLSLGKFWVLVVVGGVLACYSLLVTVAFIIFWVRSKRSRLLHSDYMNMTPRRPGPTRKHYQPYAPPRDFAAYRSRVKFSRSADAPAYQQGQNQLYNELNLGRREEYDVLDKRRGRDPEMGGKPQRRKNPQEGLYNELQKDKMAEAYSEIGMKGERRRGKGHDGLYQGLSTATKDTYDALHMQALPPR

SEQ ID NO: 2236 - protein, 818 aa, Artificial Sequence
  source: /note="Description of Artificial Sequence: Synthetic Chimeric Antigen Receptor sequence"
MLLLVTSLLLCELPHPAFLLIPEVQLVESGGGLVQPGGSLRLSCAASGFNIKDTYIHWVRQSPGKGLEWVARIYPTNGYTRYADSVKGRFTISADTSKNTAYLQMNSLRAEDTAIYYCSRWGGDGFYAMDYWGQGTLVTVSSASTKGPSVFPLAPSSKSTSGGTAALGCLVKDYFPEPVTVSWNSGALTSGVHTFPAVLQSSGLYSLSSVVTVPSSSLGTQTYICNVNHKPSNTKVDKKVEPKSCESKYGPPCPPCPGGGSSGGGSGGQPREPQVYTLPPSQEEMTKNQVSLTCLVKGFYPSDIAVEWESNGQPENNYKTTPPVLDSDGSFFLYSRLTVDKSRWQEGNVFSCSVMHEALHNHYTQKSLSLSLGKMFWVLVVVGGVLACYSLLVTVAFIIFWVRSKRSRGGHSDYMNMTPRRPGPTRKHYQPYAPPRDFAAYRSGGGRVKFSRSADAPAYQQGQNQLYNELNLGRREEYDVLDKRRGRDPEMGGKPRRKNPQEGLYNELQKDKMAEAYSEIGMKGERRRGKGHDGLYQGLSTATKDTYDALHMQALPPRLEGGGEGRGSLLTCGDVEENPGPRMLLLVTSLLLCELPHPAFLLIPDIQMTQSPILLSASVGDRVTITCRASQDVNTAVAWYQQRTNGSPRLLIYSASFLYSGVPSRFSGSRSGTDFTLTISSLQPEDEADYYCQQHYTTPPTFGAGTKVEIKRTVAAPSVFIFPPSDEQLKSGTASVVCLLNNFYPREAKVQWKVDNALQSGNSQESVTEQDSKDSTYSLSSTLTLSKADYEKHKVYACEVTHQGLSSPVTKSFNRGEC

SEQ ID NO: 2237 - protein, 438 aa, Artificial Sequence
  source: /note="Description of Artificial Sequence: Synthetic Chimeric Antigen Receptor sequence"
DIQMTQSPSSLSASVGDRVTITCRASQDVNTAVAWYQQKPGKAPKLLIVSASFLVSGVPSRFSGSRSGTDFTLTISSLQPEDFATYVCQQHYTTPPTFGQGTKVEIKRTGGGGSGGGGSGGGGSEVQLVESGGGLVQPGGSLRLSCAASGFNIKDTYIHWVRQAPGKGLEWVARIYPTNGYTRYADSVKGRFTISADTSKNTAYLQMNSLRAEDTAVVYCSRWGGDGFYAMDYWGQGTLVTVSSAAAESKVGPPCPPCPDIYIWAPLAGTCGVLLLSLVITLVCKRGRKKLLYIFKQPFMRPVQTTQEEDGCSCRFPEEEEGGCELRVKFSRSADAPAYKQGQNQLYNELNLGRREEYDVLDKRRGRDPEMGGKPRRKNPQEGLYNELQKDKMAEAVSEIGMKGERRRGKGHDGLYQGLSTATKDTYDALHMQALPPR

SEQ ID NO: 2238 - protein, 438 aa, Artificial Sequence
  source: /note="Description of Artificial Sequence: Synthetic Chimeric Antigen Receptor sequence"
DIQMTQSPSSLSASVGDRVTITCRASQDVNTAVAWYQQKPGKAPKLLIYSASFLYSGVPSRFSGSRSGTDFTLTISSLQPEDFATYYCQQHYTTPPTFGQGTKVEIKRTGGGGSGGGGSGGGGSEVQLVESGGGLVQPGGSLRLSCAASGFNIKDTYIHWVRQAPGKGLEWVARIYPTNGYTRYADSVKGRFTISADTSKNTAYLQMNSLRAEDTAVYYCSRWGGDGFYAMDYWGQGTLVTVSSAAAESKYGPPCPPCPDIYIWAPLAGTCGVLLLSLVITLYCKRGRKKLLYIFKQPFMRPVQTTQEEDGCSCRFPEEEEGGCELRVKFSRSADAPAYKQGQNQLYNELNLGRREEYDVLDKRRGRDPEMGGKPRRKNPQEGLYNELQKDKMAEAYSEIGMKGERRRGKGHDGLYQGLSTATKDTYDALHMQALPPR

SEQ ID NO: 2239 - protein, 470 aa, Artificial Sequence
  source: /note="Description of Artificial Sequence: Synthetic Chimeric Antigen Receptor sequence"
DIQMTQSPSSLSASVGDRVTITCRASQDVNTAVAWYQQKPGKAPKLLIVSASFLVSGVPSRFSGSRSGTDFTLTISSLQPEDFATYVCQQHYTTPPTFGQGTKVEIKRTGGGGSGGGGSGGGGSEVQLVESGGGLVQPGGSLRLSCAASGFNIKDTYIHWVRQAPGKGLEWVARIYPTNGYTRYADSVKGRFTISADTSKNTAYLQMNSLRAEDTAVVYCSRWGGDGFYAMDYWGQGTLVTVSSAAATTTPAPRPPTPAPTIASQPLSLRPEACRPAAGGAVHTRGLDFACDIYIWAPLAGTCGVLLLSLVITLVCKRGRKKLLYIFKQPFMRPVQTIQEEDGCSCRFPEEEEGGCELRVKFSRSADAPAYKQGQNQLYNELNLGRREEYDVLDKRRGRDPEMGGKPRRKNPQEGLYNELQKDKMAEAVSEIGMKGERRRGKGHDGLYQGLSTATKDTYDALHMQALPPR

SEQ ID NO: 2240 - protein, 470 aa, Artificial Sequence
  source: /note="Description of Artificial Sequence: Synthetic Chimeric Antigen Receptor sequence"
DIQMTQSPSSLSASVGDRVTITCRASQDVNTAVAWYQQKPGKAPKLLIYSASFLYSGVPSRFSGSRSGTDFTLTISSLQPEDFATYYCQQHYTTPPTFGQGTKVEIKRTGGGGSGGGGSGGGGSEVQLVESGGGLVQPGGSLRLSCAASGFNIKDTYIHWVRQAPGKGLEWVARIYPTNGYTRYADSVKGRFTISADTSKNTAYLQMNSLRAEDTAVYYCSRWGGDGFYAMDYWGQGTLVTVSSAAATTTPAPRPPTPAPTIASQPLSLRPEACRPAAGGAVHTRGLDFACDIYIWAPLAGTCGVLLLSLVITLYCKRGRKKLLYIFKQPFMRPVQTTQEEDGCSCRFPEEEEGGCELRVKFSRSADAPAYKQGQNQLYNELNLGRREEYDVLDKRRGRDPEMGGKPRRKNPQEGLYNELQKDKMAEAYSEIGMKGERRRGKGHDGLYQGLSTATKDTYDALHMQALPPR

SEQ ID NO: 2241 - protein, 680 aa, Artificial Sequence
  source: /note="Description of Artificial Sequence: Synthetic Chimeric Antigen Receptor sequence"
MLLLVTSLLLCELPHPAFLLIPMAQVKLQQSGPDLVKPGASVKISCKASGYSFTGYYMHWVKQSHGKSLEWIGRVNPNSGGTSYNQKFKDKAILTVDKSSSTAYMELRSLTSEDSAVYYCARSKGNYFYAMDYWGQGTTVTVSSSGGGSGGGGSGGGGSDIELTQSPSSLAVSLGQRATISCRASESVDSHGTSLMHWYQQKPGQPPKFLIYRASNLESGIPARFSGSGSRTDFTLTINPVETDDVAIYYCQQSNEDPPTFGGGTKLELKESKYGPPCPPCPAPEFLGGPSVFLFPPKPKDTLMISRTPEVTCVVVDVSQEDPEVQFNWYVDGVEVHNAKTKPREEQFNSTYRVVSVLTVLHQDWLNGKEYKCKVSNKGLPSSIEKTISKAKGQPREPQVYTLPPSQEEMTKNQVSLTCLVKGFYPSDIAVEWESNGQPENNYKTTPPVLDSDGSFFLYSRLTVDKSRWQEGNVFSCSVMHEALHNHYTQKSLSLSLGKMFWVLVVVGGVLACYSLLVTVAFIIFWVRSKRSRGGHSDYMNMTPRRPGPTRKHYQPYAPPRDFAAYRSRVKFSRSADAPAYQQGQNQLYNELNLGRREEYDVLDKRRGRDPEMGGKPRRKNPQEGLYNELQKDKMAEAYSEIGMKGERRRGKGHDGLYQGLSTATKDTYDALHMQALPPR

SEQ ID NO: 2242 - protein, 816 aa, Artificial Sequence
  source: /note="Description of Artificial Sequence: Synthetic Chimeric Antigen Receptor sequence"
MLLLVTSLLLCELPHPAFLLIPDIQMTQSPILLSASVGDRVTITCRASQDVNTAVAWYQQRTNGSPRLLIYSASFLYSGVPSRFSGSRSGTDFTLTISSLQPEDEADYYCQQHYTTPPTFGAGTKVEIKRTVAAPSVFIFPPSDEQLKSGTASVVCLLNNFYPREAKVQWKVDNALQSGNSQESVTEQDSKDSTYSLSSTLTLSKADYEKHKVYACEVTHQGLSSPVTKSFNRGECLEGGGEGRGSLLTCGDVEENPGMLLLVTSLLLCELPHPAFLLIPEVQLVESGGGLVQPGGSLRLSCAASGFNIKDTYIHWVRQSPGKGLEWVARIYPTNGYTRYADSVKGRFTISADTSKNTAYLQMNSLRAEDTAIYYCSRWGGDGFYAMDYWGQGTLVTVSSASTKGPSVFPLAPSSKSTSGGTAALGCLVKDYFPEPVTVSWNSGALTSGVHTFPAVLQSSGLYSLSSVVTVPSSSLGTQTYICNVNHKPSNTKVDKKVEPKSCESKYGPPCPPCPGGGSSGGGSGGQPREPQVYTLPPSQEEMTKNQVSLTCLVKGFYPSDIAVEWESNGQPENNYKTTPPVLDSDGSFFLYSRLTVDKSRWQEGNVFSCSVMHEALHNHYTQKSLSLSLGKMFWVLVVVGGVLACYSLLVTVAFIIFWVRSKRSRGGHSDYMNMTPRRPGPTRKHYQPYAPPRDFAAYRSGGGRVKFSRSADAPAYQQGQNQLYNELNLGRREEYDVLDKRRGRDPEMGGKPRRKNPQEGLYNELQKDKMAEAYSEIGMKGERRRGKGHDGLYQGLSTATKDTYDALHMQALPPR

SEQ ID NO: 2243 - protein, 1162 aa, Artificial Sequence
  source: /note="Description of Artificial Sequence: Synthetic Chimeric Antigen Receptor sequence"
MLLLVTSLLLCELPHPAFLLIPEVQLVESGGGLVQPGGSLRLSCAASGFNIKDTYIHWVRQSPGKGLEWVARIYPTNGYTRYADSVKGRFTISADTSKNTAYLQMNSLRAEDTAIYYCSRWGGDGFYAMDYWGQGTLVTVSSASTKGPSVFPLAPSSKSTSGGTAALGCLVKDYFPEPVTVSWNSGALTSGVHTFPAVLQSSGLYSLSSVVTVPSSSLGTQTYICNVNHKPSNTKVDKKVEPKSCESKYGPPCPPCPGGGSSGGGSGGQPREPQVYTLPPSQEEMTKNQVSLTCLVKGFYPSDIAVEWESNGQPENNYKTTPPVLDSDGSFFLYSRLTVDKSRWQEGNVFSCSVMHEALHNHYTQKSLSLSLGKMFWVLVVVGGVLACYSLLVTVAFIIFWVRSKRSRGGHSDYMNMTPRRPGPTRKHYQPYAPPRDFAAYRSGGGRVKFSRSADAPAYQQGQNQLYNELNLGRREEYDVLDKRRGRDPEMGGKPRRKNPQEGLYNELQKDKMAEAYSEIGMKGERRRGKGHDGLYQGLSTATKDTYDALHMQALPPRLEGGGEGRGSLLTCGDVEENPGPRMPPPRLLFFLLFLTPMEVRPEEPLVVKVEEGDNAVLQCLKGTSDGPTQQLTWSRESPLKPFLKLSLGLPGLGIHMRPLAIWLFIFNVSQQMGGFYLCQPGPPSEKAWQPGWTVNVEGSGELFRWNVSDLGGLGCGLKNRSSEGPSSPSGKLMSPKLYVWAKDRPEIWEGEPPCVPPRDSLNQSLSQDLTMAPGSTLWLSCGVPPDSVSRGPLSWTHVHPKGPKSLLSLELKDDRPARDMWVMETGLLLPRATAQDAGKYYCHRGNLTMSFHLEITARPVLWHWLLRTGGWKVSAVTLAYLIFCLCSLVGILHLQRALVLRRKRGGSTSEGRGSLLTCGDVEENPGPMETDTLLLWVLLLWVPGSTGDIQMTQSPILLSASVGDRVTITCRASQDVNTAVAWYQQRTNGSPRLLIYSASFLYSGVPSRFSGSRSGTDFTLTISSLQPEDEADYYCQQHYTTPPTFGAGTKVEIKRTVAAPSVFIFPPSDEQLKSGTASVVCLLNNFYPREAKVQWKVDNALQSGNSQESVTEQDSKDSTYSLSSTLTLSKADYEKHKVYACEVTHQGLSSPVTKSFNRGEC

SEQ ID NO: 2244 - protein, 606 aa, Artificial Sequence
  source: /note="Description of Artificial Sequence: Synthetic Chimeric Antigen Receptor sequence"
MHPLLNPLLLALGLMALLLTTVIALTCLGGFASPGPVPPSTALRELIEELVNITQNQKAPLCNGSMVWSINLTAGMYCAALESLINVSGCSAIEKTQRMLSGFCPHKVSAGQFSSLHVRDTKIEVAQFVKDLLLHLKKLFREGQFNPRKPTTTPAPRPPTPAPTIASQPLSLRPEACRPAAGGAVHTRGLDFAQLLCYLLDGILFIYGVILTALFLRVVTFWVRSKRSRLLHSDYMNMTPRRPGPTRKHYQPYAPPRDFAAYRSTRKFSRSADAPAYQQGQNQLYNELNLGRREEYDVLDKRRGRDPEMGGKPRRKNPQEGLYNELQKDKMAEAYSEIGMKGERRRGKGHDGLYQGLSTATKDTYDALHMQALPPRQPAAAEGRGSLLTCGDVEENPGPMDKDCEMKRTTLDSPLGKLELSGCEQGLHEIKLLGKGTSAADAVEVPAPAAVLGGPEPLMQCTAWLNAYFHQPEAIEEFPVPALHHPVFQQESFTRQVLWKLLKVVKFGEVISYQQLAALAGNPKAARAVGGAMRGNPVKILIPCHRVVCSSGAVGNYSGGLAVKEWLLAHEGHRLGKPGLGGSSGLAGAWLKGAGATSGSPPAGRN

SEQ ID NO: 2245 - protein, 330 aa, Artificial Sequence
  source: /note="Description of Artificial Sequence: Synthetic Chimeric Antigen Receptor sequence"
MVRGVPFRHLLLVLQLALLPAATQGKKVVLGKKGDTVELTCTASQKKSIQFHWKNSNQIKILGNQGSFLTKGPSKLNDRADSRRSLWDQGNFPLIIKNLKIEDSDTYICEVEDQKEEVQLLVFGLTANSDTHLLQGQSLTLTLESPPGSSPSVQCRSPRGKNIQGGKTLSVSQLELQDSGTWTCTVLQNQKKVEFKIDIVVLAFQKASGGGGSKQVGNKFFLTNGEIMTFEKVKALCVKFQASVATPRNAAENGAIQNLIKEEAFLGITDEKTEGQFVDLTGNRLTYTNWNEGEPNNAGSDEDCVLLLKNGQWNDVPCSTSHLAVCEFPI

SEQ ID NO: 2246 - protein, 354 aa, Artificial Sequence
  source: /note="Description of Artificial Sequence: Synthetic Chimeric Antigen Receptor sequence"
MVRGVPFRHLLLVLQLALLPAATQGKKVVLGKKGDTVELTCTASQKKSIQFHWKNSNQIKILGNQGSFLTKGPSKLNDRADSRRSLWDQGNFPLIIKNLKIEDSDTYICEVEDQKEEVQLLVFGLTANSDTHLLQGQSLTLTLESPPGSSPSVQCRSPRGKNIQGGKTLSVSQLELQDSGTWTCTVLQNQKKVEFKIDIVVLAFQKASGGGGSQNDILQVVSQGWKYFKGNFYYFSLIPKTWYSAEQFCVSRNSHLTSVTSESEQEFLYKTAGGLIYWIGLTKAGMEGDWSWVDDTPFNKVQSVRFWIPGEPNNAGNNEHCGNIKAPSLQAWNDAPCDKTFLFICKRPYVPSEP

SEQ ID NO: 2247 - protein, 362 aa, Artificial Sequence
  source: /note="Description of Artificial Sequence: Synthetic Chimeric Antigen Receptor sequence"
MVRGVPFRHLLLVLQLALLPAATQGKKVVLGKKGDTVELTCTASQKKSIQFHWKNSNQIKILGNQGSFLTKGPSKLNDRADSRRSLWDQGNFPLIIKNLKIEDSDTYICEVEDQKEEVQLLVFGLTANSDTHLLQGQSLTLTLESPPGSSPSVQCRSPRGKNIQGGKTLSVSQLELQDSGTWTCTVLQNQKKVEFKIDIVVLAFQKASGGGGSIYQELTDLKTAFERLCRHCPKDWTFFQGNCYFMSNSQRNWHDSVTACQEVRAQLVVIKTAEEQNFLQLQTSRSNRFSWMGLSDLNQEGTWQWVDGSPLSPSFQRYWNSGEPNNSGNEDCAEFSGSGWNDNRCDVDNYWICKKPAACFRD

SEQ ID NO: 2248 - protein, 380 aa, Artificial Sequence [sequence omitted]

SEQ ID NO: 2249 - protein, 457 aa, Artificial Sequence
  source: /note="Description of Artificial Sequence: Synthetic Chimeric Antigen Receptor sequence"
MALPVTALLLPLALLLHAARPEVKLQESGPGLVAPSQSLSFTCTVSGFSLSRNSVHWVRQPPGKGLEWLGMIWGGGSTDYNSALKSRLNISKDSSKSQVFLKMNSLQTDDTAMYFCARNGGYDVFHYWGQGTTVTVSSGGGGSGGGGSGGGGSQAVVTQESALTTSPGETVTLTCRSSTGAVTTSNYANWVQEKPDHLFTGLIGGTNNRAPGVPARFSGSLIGDKAALTITGAQTEDEAIYFCALWYSNHLVFGGGTKLTVLGGLAVSTISSFFPPGYQIYIWAPLAGTCGVLLLSLVITLYCKRGRKKLLYIFKQPFMRPVQTTQEEDGCSCRFPEEEEGGCELRVKFSRSADAPAYQQGQNQLYNELNLGRREEYDVLDKRRGRDPEMGGKPRRKNPQEGLYNELQKDKMAEAYSEIGMKGERRRGKGHDGLYQGLSTATKDTYDALHMQALPPR

SEQ ID NO: 2250 - protein, 180 aa, Artificial Sequence; identical to SEQ ID NO: 1208
  source: /note="Description of Artificial Sequence: Synthetic Chimeric Antigen Receptor sequence"

SEQ ID NO: 2251 - protein, 457 aa, Artificial Sequence
  source: /note="Description of Artificial Sequence: Synthetic Chimeric Antigen Receptor sequence"
MALPVTALLLPLALLLHAARPEVQLVESGGGLVQPGGSLRLSCAASGFSLSRNSVHWVRQAPGKGLEWLGMIWGGGSTDYNSALKSRFTISRDNSKNTLYLQMNSLRAEDTAVYYCARNGGYDVFHYWGQGTTVTVSSGGGGSGGGGSGGGGSQAVVTQEPSLTVSPGGTVTLTCRSSTGAVTTSNYANWVQQKPGQAPRGLIGGTNNRAPWTPARFSGSLLGGKAALTLSGVQPEDEAEYYCALWYSNHLVFGGGTKLTVLGGLAVSTISSFFPPGYQIYIWAPLAGTCGVLLLSLVITLYCKRGRKKLLYIFKQPFMRPVQTTQEEDGCSCRFPEEEEGGCELRVKFSRSADAPAYQQGQNQLYNELNLGRREEYDVLDKRRGRDPEMGGKPRRKNPQEGLYNELQKDKMAEAYSEIGMKGERRRGKGHDGLYQGLSTATKDTYDALHMQALPPR

SEQ ID NO: 2252 - protein, 460 aa, Artificial Sequence
  source: /note="Description of Artificial Sequence: Synthetic Chimeric Antigen Receptor sequence"
MALPVTALLLPLALLLHAARPEVKLQESGPGLVAPSQSLSFTCTVSGFSLSRNSVHWVRQPPGKGLEWLGMIWGGGSTDYNSALKSRLNISKDSSKSQVFLKMNSLQTDDTAMYFCARNGGYDVFHYWGQGTTVTVSSGGGGSGGGGSGGGGSQAVVTQESALTTSPGETVTLTCRSSTGAVTTSNYANWVQEKPDHLFTGLIGGTNNRAPGVPARFSGSLIGDKAALTITGAQTEDEAIYFCALWYSNHLVFGGGTKLTVLGGLAVSTISSFFPPGYQIISFFLALTSTALLFLLFFLTLRFSVVKRGRKKLLYIFKQPFMRPVQTTQEEDGCSCRFPEEEEGGCELRVKFSRSADAPAYQQGQNQLYNELNLGRREEYDVLDKRRGRDPEMGGKPRRKNPQEGLYNELQKDKMAEAYSEIGMKGERRRGKGHDGLYQGLSTATKDTYDALHMQALPPR

SEQ ID NO: 2253 - protein, 460 aa, Artificial Sequence
  source: /note="Description of Artificial Sequence: Synthetic Chimeric Antigen Receptor sequence"
MALPVTALLLPLALLLHAARPEVQLVESGGGLVQPGGSLRLSCAASGFSLSRNSVHWVRQAPGKGLEWLGMIWGGGSTDYNSALKSRFTISRDNSKNTLYLQMNSLRAEDTAVYYCARNGGYDVFHYWGQGTTVTVSSGGGGSGGGGSGGGGSQAVVTQEPSLTVSPGGTVTLTCRSSTGAVTTSNYANWVQQKPGQAPRGLIGGTNNRAPWTPARFSGSLLGGKAALTLSGVQPEDEAEYYCALWYSNHLVFGGGTKLTVLGGLAVSTISSFFPPGYQIISFFLALTSTALLFLLFFLTLRFSVVKRGRKKLLYIFKQPFMRPVQTTQEEDGCSCRFPEEEEGGCELRVKFSRSADAPAYQQGQNQLYNELNLGRREEYDVLDKRRGRDPEMGGKPRRKNPQEGLYNELQKDKMAEAYSEIGMKGERRRGKGHDGLYQGLSTATKDTYDALHMQALPPR

SEQ ID NO: 2254 - protein, 486 aa, Artificial Sequence
  source: /note="Description of Artificial Sequence: Synthetic Chimeric Antigen Receptor sequence"
MALPVTALLLPLALLLHAARPEVKLQESGPGLVAPSQSLSFTCTVSGFSLSRNSVHWVRQPPGKGLEWLGMIWGGGSTDYNSALKSRLNISKDSSKSQVFLKMNSLQTDDTAMYFCARNGGYDVFHYWGQGTTVTVSSGGGGSGGGGSGGGGSQAVVTQESALTTSPGETVTLTCRSSTGAVTTSNYANWVQEKPDHLFTGLIGGTNNRAPGVPARFSGSLIGDKAALTITGAQTEDEAIYFCALWYSNHLVFGGGTKLTVLGTTTPAPRPPTPAPTIASQPLSLRPEACRPAAGGAVHTRGLDFACDIYIWAPLAGTCGVLLLSLVITLYCKRGRKKLLYIFKQPFMRPVQTTQEEDGCSCRFPEEEEGGCELRVKFSRSADAPAYQQGQNQLYNELNLGRREEYDVLDKRRGRDPEMGGKPRRKNPQEGLYNELQKDKMAEAYSEIGMKGERRRGKGHDGLYQGLSTATKDTYDALHMQALPPR

SEQ ID NO: 2255 - protein, 486 aa, Artificial Sequence
  source: /note="Description of Artificial Sequence: Synthetic Chimeric Antigen Receptor sequence"
MALPVTALLLPLALLLHAARPEVQLVESGGGLVQPGGSLRLSCAASGFSLSRNSVHWVRQAPGKGLEWLGMIWGGGSTDYNSALKSRFTISRDNSKNTLYLQMNSLRAEDTAVYYCARNGGYDVFHYWGQGTTVTVSSGGGGSGGGGSGGGGSQAVVTQEPSLTVSPGGTVTLTCRSSTGAVTTSNYANWVQQKPGQAPRGLIGGTNNRAPWTPARFSGSLLGGKAALTLSGVQPEDEAEYYCALWYSNHLVFGGGTKLTVLGTTTPAPRPPTPAPTIASQPLSLRPEACRPAAGGAVHTRGLDFACDIYIWAPLAGTCGVLLLSLVITLYCKRGRKKLLYIFKQPFMRPVQTTQEEDGCSCRFPEEEEGGCELRVKFSRSADAPAYQQGQNQLYNELNLGRREEYDVLDKRRGRDPEMGGKPRRKNPQEGLYNELQKDKMAEAYSEIGMKGERRRGKGHDGLYQGLSTATKDTYDALHMQALPPR

SEQ ID NO: 2256 - protein, 489 aa, Artificial Sequence
  source: /note="Description of Artificial Sequence: Synthetic Chimeric Antigen Receptor sequence"
MALPVTALLLPLALLLHAARPEVKLQESGPGLVAPSQSLSFTCTVSGFSLSRNSVHWVRQPPGKGLEWLGMIWGGGSTDYNSALKSRLNISKDSSKSQVFLKMNSLQTDDTAMYFCARNGGYDVFHYWGQGTTVTVSSGGGGSGGGGSGGGGSQAVVTQESALTTSPGETVTLTCRSSTGAVTTSNYANWVQEKPDHLFTGLIGGTNNRAPGVPARFSGSLIGDKAALTITGAQTEDEAIYFCALWYSNHLVFGGGTKLTVLGTTTPAPRPPTPAPTIASQPLSLRPEACRPAAGGAVHTRGLDFACDIISFFLALTSTALLFLLFFLTLRFSVVKRGRKKLLYIFKQPFMRPVQTTQEEDGCSCRFPEEEEGGCELRVKFSRSADAPAYQQGQNQLYNELNLGRREEYDVLDKRRGRDPEMGGKPRRKNPQEGLYNELQKDKMAEAYSEIGMKGERRRGKGHDGLYQGLSTATKDTYDALHMQALPPR

SEQ ID NO: 2257 - protein, 489 aa, Artificial Sequence
  source: /note="Description of Artificial Sequence: Synthetic Chimeric Antigen Receptor sequence"
MALPVTALLLPLALLLHAARPEVQLVESGGGLVQPGGSLRLSCAASGFSLSRNSVHWVRQAPGKGLEWLGMIWGGGSTDYNSALKSRFTISRDNSKNTLYLQMNSLRAEDTAVYYCARNGGYDVFHYWGQGTTVTVSSGGGGSGGGGSGGGGSQAVVTQEPSLTVSPGGTVTLTCRSSTGAVTTSNYANWVQQKPGQAPRGLIGGTNNRAPWTPARFSGSLLGGKAALTLSGVQPEDEAEYYCALWYSNHLVFGGGTKLTVLGTTTPAPRPPTPAPTIASQPLSLRPEACRPAAGGAVHTRGLDFACDIISFFLALTSTALLFLLFFLTLRFSVVKRGRKKLLYIFKQPFMRPVQTTQEEDGCSCRFPEEEEGGCELRVKFSRSADAPAYQQGQNQLYNELNLGRREEYDVLDKRRGRDPEMGGKPRRKNPQEGLYNELQKDKMAEAYSEIGMKGERRRGKGHDGLYQGLSTATKDTYDALHMQALPPR

SEQ ID NO: 2258 - protein, 672 aa, Artificial Sequence
  source: /note="Description of Artificial Sequence: Synthetic Chimeric Antigen Receptor sequence"
MALPVTALLLPLALLLHAARPEVKLQESGPGLVAPSQSLSFTCTVSGFSLSRNSVHWVRQPPGKGLEWLGMIWGGGSTDYNSALKSRLNISKDSSKSQVFLKMNSLQTDDTAMYFCARNGGYDVFHYWGQGTTVTVSSGGGGSGGGGSGGGGSQAVVTQESALTTSPGETVTLTCRSSTGAVTTSNYANWVQEKPDHLFTGLIGGTNNRAPGVPARFSGSLIGDKAALTITGAQTEDEAIYFCALWYSNHLVFGGGTKLTVLGEPKSPDKTHTCPPCPAPPVAGPSVFLFPPKPKDTLMIARTPEVTCVVVDVSHEDPEVKFNWYVDGVEVHNAKTKPREEQYNSTYRVVSVLTVLHQDWLNGKEYKCKVSNKALPAPIEKTISKAKGQPREPQVYTLPPSRDELTKNQVSLTCLVKGFYPSDIAVEWESNGQPENNYKTTPPVLDSDGSFFLYSKLTVDKSRWQQGNVFSCSVMHEALHNHYTQKSLSLSPGKIYIWAPLAGTCGVLLLSLVITLYCKRGRKKLLYIFKQPFMRPVQTTQEEDGCSCRFPEEEEGGCELRVKFSRSADAPAYQQGQNQLYNELNLGRREEYDVLDKRRGRDPEMGGKPRRKNPQEGLYNELQKDKMAEAYSEIGMKGERRRGKGHDGLYQGLSTATKDTYDALHMQALPPR

SEQ ID NO: 2259 - protein, 672 aa, Artificial Sequence
  source: /note="Description of Artificial Sequence: Synthetic Chimeric Antigen Receptor sequence"
MALPVTALLLPLALLLHAARPEVQLVESGGGLVQPGGSLRLSCAASGFSLSRNSVHWVRQAPGKGLEWLGMIWGGGSTDYNSALKSRFTISRDNSKNTLYLQMNSLRAEDTAVYYCARNGGYDVFHYWGQGTTVTVSSGGGGSGGGGSGGGGSQAVVTQEPSLTVSPGGTVTLTCRSSTGAVTTSNYANWVQQKPGQAPRGLIGGTNNRAPWTPARFSGSLLGGKAALTLSGVQPEDEAEYYCALWYSNHLVFGGGTKLTVLGEPKSPDKTHTCPPCPAPPVAGPSVFLFPPKPKDTLMIARTPEVTCVVVDVSHEDPEVKFNWYVDGVEVHNAKTKPREEQYNSTYRVVSVLTVLHQDWLNGKEYKCKVSNKALPAPIEKTISKAKGQPREPQVYTLPPSRDELTKNQVSLTCLVKGFYPSDIAVEWESNGQPENNYKTTPPVLDSDGSFFLYSKLTVDKSRWQQGNVFSCSVMHEALHNHYTQKSLSLSPGKIYIWAPLAGTCGVLLLSLVITLYCKRGRKKLLYIFKQPFMRPVQTTQEEDGCSCRFPEEEEGGCELRVKFSRSADAPAYQQGQNQLYNELNLGRREEYDVLDKRRGRDPEMGGKPRRKNPQEGLYNELQKDKMAEAYSEIGMKGERRRGKGHDGLYQGLSTATKDTYDALHMQALPPR

SEQ ID NO: 2260 - protein, 675 aa, Artificial Sequence
  source: /note="Description of Artificial Sequence: Synthetic Chimeric Antigen Receptor sequence"
MALPVTALLLPLALLLHAARPEVKLQESGPGLVAPSQSLSFTCTVSGFSLSRNSVHWVRQPPGKGLEWLGMIWGGGSTDYNSALKSRLNISKDSSKSQVFLKMNSLQTDDTAMYFCARNGGYDVFHYWGQGTTVTVSSGGGGSGGGGSGGGGSQAVVTQESALTTSPGETVTLTCRSSTGAVTTSNYANWVQEKPDHLFTGLIGGTNNRAPGVPARFSGSLIGDKAALTITGAQTEDEAIYFCALWYSNHLVFGGGTKLTVLGEPKSPDKTHTCPPCPAPPVAGPSVFLFPPKPKDTLMIARTPEVTCVVVDVSHEDPEVKFNWYVDGVEVHNAKTKPREEQYNSTYRVVSVLTVLHQDWLNGKEYKCKVSNKALPAPIEKTISKAKGQPREPQVYTLPPSRDELTKNQVSLTCLVKGFYPSDIAVEWESNGQPENNYKTTPPVLDSDGSFFLYSKLTVDKSRWQQGNVFSCSVMHEALHNHYTQKSLSLSPGKIISFFLALTSTALLFLLFFLTLRFSVVKRGRKKLLYIFKQPFMRPVQTTQEEDGCSCRFPEEEEGGCELRVKFSRSADAPAYQQGQNQLYNELNLGRREEYDVLDKRRGRDPEMGGKPRRKNPQEGLYNELQKDKMAEAYSEIGMKGERRRGKGHDGLYQGLSTATKDTYDALHMQALPPR

SEQ ID NO: 2261 - protein, 675 aa, Artificial Sequence
  source: /note="Description of Artificial Sequence: Synthetic Chimeric Antigen Receptor sequence"
MALPVTALLLPLALLLHAARPEVQLVESGGGLVQPGGSLRLSCAASGFSLSRNSVHWVRQAPGKGLEWLGMIWGGGSTDYNSALKSRFTISRDNSKNTLYLQMNSLRAEDTAVYYCARNGGYDVFHYWGQGTTVTVSSGGGGSGGGGSGGGGSQAVVTQEPSLTVSPGGTVTLTCRSSTGAVTTSNYANWVQQKPGQAPRGLIGGTNNRAPWTPARFSGSLLGGKAALTLSGVQPEDEAEYYCALWYSNHLVFGGGTKLTVLGEPKSPDKTHTCPPCPAPPVAGPSVFLFPPKPKDTLMIARTPEVTCVVVDVSHEDPEVKFNWYVDGVEVHNAKTKPREEQYNSTYRVVSVLTVLHQDWLNGKEYKCKVSNKALPAPIEKTISKAKGQPREPQVYTLPPSRDELTKNQVSLTCLVKGFYPSDIAVEWESNGQPENNYKTTPPVLDSDGSFFLYSKLTVDKSRWQQGNVFSCSVMHEALHNHYTQKSLSLSPGKIISFFLALTSTALLFLLFFLTLRFSVVKRGRKKLLYIFKQPFMRPVQTTQEEDGCSCRFPEEEEGGCELRVKFSRSADAPAYQQGQNQLYNELNLGRREEYDVLDKRRGRDPEMGGKPRRKNPQEGLYNELQKDKMAEAYSEIGMKGERRRGKGHDGLYQGLSTATKDTYDALHMQALPPR

SEQ ID NO: 2262 - protein, 606 aa, Artificial Sequence
  source: /note="Description of Artificial Sequence: Synthetic Chimeric Antigen Receptor sequence"
MHPLLNPLLLALGLMALLLTTVIALTCLGGFASPGPVPPSTALRKLIEELVNITQNQKAPLCNGSMVWSINLTAGMYCAALESLINVSGCSAIEKTQRMLSGFCPHKVSAGQFSSLHVRDTKIEVAQFVKDLLLHLKKLFKEGQFNPRKPTTTPAPRPPTPAPTIASQPLSLRPEACRPAAGGAVHTRGLDFAQLLCYLLDGILFIYGVILTALFLRVVTFWVRSKRSRLLHSDYMNMTPRRPGPTRKHYQPYAPPRDFAAYRSTRKFSRSADAPAYQQGQNQLYNELNLGRREEYDVLDKRRGRDPEMGGKPRRKNPQEGLYNELQKDKMAEAYSEIGMKGERRRGKGHDGLYQGLSTATKDTYDALHMQALPPRQPAAAEGRGSLLTCGDVEENPGPMDKDCEMKRTTLDSPLGKLELSGCEQGLHEIKLLGKGTSAADAVEVPAPAAVLGGPEPLMQCTAWLNAYFHQPEAIEEFPVPALHHPVFQQESFTRQVLWKLLKVVKFGEVISYQQLAALAGNPKAARAVGGAMRGNPVKILIPCHRVVCSSGAVGNYSGGLAVKEWLLAHEGHRLGKPGLGGSSGLAGAWLKGAGATSGSPPAGRN

SEQ ID NO: 2263 - protein, 606 aa, Artificial Sequence
  source: /note="Description of Artificial Sequence: Synthetic Chimeric Antigen Receptor sequence"
MHPLLNPLLLALGLMALLLTTVIALTCLGGFASPGPVPPSTALRYLIEELVNITQNQKAPLCNGSMVWSINLTAGMYCAALESLINVSGCSAIEKTQRMLSGFCPHKVSAGQFSSLHVRDTKIEVAQFVKDLLLHLKKLFREGQFNPRKPTTTPAPRPPTPAPTIASQPLSLRPEACRPAAGGAVHTRGLDFAQLLCYLLDGILFIYGVILTALFLRVVTFWVRSKRSRLLHSDYMNMTPRRPGPTRKHYQPYAPPRDFAAYRSTRKFSRSADAPAYQQGQNQLYNELNLGRREEYDVLDKRRGRDPEMGGKPRRKNPQEGLYNELQKDKMAEAYSEIGMKGERRRGKGHDGLYQGLSTATKDTYDALHMQALPPRQPAAAEGRGSLLTCGDVEENPGPMDKDCEMKRTTLDSPLGKLELSGCEQGLHEIKLLGKGTSAADAVEVPAPAAVLGGPEPLMQCTAWLNAYFHQPEAIEEFPVPALHHPVFQQESFTRQVLWKLLKVVKFGEVISYQQLAALAGNPKAARAVGGAMRGNPVKILIPCHRVVCSSGAVGNYSGGLAVKEWLLAHEGHRLGKPGLGGSSGLAGAWLKGAGATSGSPPAGRN

SEQ ID NO: 2264 - protein, 889 aa, Artificial Sequence
  source: /note="Description of Artificial Sequence: Synthetic Chimeric Antigen Receptor sequence"
MLLLVTSLLLCELPHPAFLLIPGPVPPSTALRYLIEELVNITQNQKAPLCNGSMVWSINLTAGMYCAALESLINVSGCSAIEKTQRMLSGFCPHKVSAGQFSSLHVRDTKIEVAQFVKDLLLHLKKLFREGRFNESKYGPPCPPCPAPEFEGGPSVFLFPPKPKDTLMISRTPEVTCVVVDVSQEDPEVQFNWYVDGVEVHNAKTKPREEQFQSTYRVVSVLTVLHQDWLNGKEYKCKVSNKGLPSSIEKTISKAKGQPREPQVYTLPPSQEEMTKNQVSLTCLVKGFYPSDIAVEWESNGQPENNYKTTPPVLDSDGSFFLYSRLTVDKSRWQEGNVFSCSVMHEALHNHYTQKSLSLSLGKMALIVLGGVAGLLLFIGLGIFFKRGRKKLLYIFKQPFMRPVQTTQEEDGCSCRFPEEEEGGCELGGGRVKFSRSADAPAYQQGQNQLYNELNLGRREEYDVLDKRRGRDPEMGGKPRRKNPQEGLYNELQKDKMAEAYSEIGMKGERRRGKGHDGLYQGLSTATKDTYDALHMQALPPRLEGGGEGRGSLLTCGDVEENPGPRMPPPRLLFFLLFLTPMEVRPEEPLVVKVEEGDNAVLQCLKGTSDGPTQQLTWSRESPLKPFLKLSLGLPGLGIHMRPLAIWLFIFNVSQQMGGFYLCQPGPPSEKAWQPGWTVNVEGSGELFRWNVSDLGGLGCGLKNRSSEGPSSPSGKLMSPKLYVWAKDRPEIWEGEPPCVPPRDSLNQSLSQDLTMAPGSTLWLSCGVPPDSVSRGPLSWTHVHPKGPKSLLSLELKDDRPARDMWVMETGLLLPRATAQDAGKYYCHRGNLTMSFHLEITARPVLWHWLLRTGGWKVSAVTLAYLIFCLCSLVGILHLQRALVLRRKR

SEQ ID NO: 2265 - protein, 200 aa, Artificial Sequence
  source: /note="Description of Artificial Sequence: Synthetic Chimeric Antigen Receptor sequence"
DLEPKSCDKTHTCPPCPDPKFWVLVVVGGVLACYSLLVTVAFIIFWVRSKRSRLLHSDYMNMTPRRPGPTRKHYQPYAPPRDFAAYRSRVKFSRSADAPAYQQGQNQLYNELNLGRREEYDVLDKRRGRDPEMGGKPRRKNPQEGLYNELQKDKMAEAYSEIGMKGERRRGKGHDGLYQGLSTATKDTYDALHMQALPPR

SEQ ID NO: 2266 - protein, 419 aa, Artificial Sequence
  source: /note="Description of Artificial Sequence: Synthetic Chimeric Antigen Receptor sequence"
DPAEPKSPDKTHTCPPCPAPELLGGPSVFLFPPKPKDTLMISRTPEVTCVVVDVSHEDPEVKFNWYVDGVEVHNAKTKPREEQYNSTYRVVSVLTVLHQDWLNGKEYKCKVSNKALPAPIEKTISKAKGQPREPQVYTLPPSRDELTKNQVSLTCLVKGFYPSDIAVEWESNGQPENNYKTTPPVLDSDGSFFLYSKLTVDKSRWQQGNVFSCSVMHEALHNHYTQKSLSLSPGKKDPKFWVLVVVGGVLACYSLLVTVAFIIFWVRSKRSRLLHSDYMNMTPRRPGPTRKHYQPYAPPRDFAAYRSRVKFSRSADAPAYQQGQNQLYNELNLGRREEYDVLDKRRGRDPEMGGKPRRKNPQEGLYNELQKDKMAEAYSEIGMKGERRRGKGHDGLYQGLSTATKDTYDALHMQALPPR

SEQ ID NO: 2267 - protein, 467 aa, Artificial Sequence
  source: /note="Description of Artificial Sequence: Synthetic Chimeric Antigen Receptor sequence"
MDWIWRILFLVGAATGAHSQVQLQQPGAELVRPGASVKLSCKASGYTFSNYLMNWVKQRPEQDLDWIGRIDPYDGDIDYNQNFKDKAILTVDKSSSTAYMQLSSLTSEDSAVYYCARGYGTAYGVDYWGQGTSVTVSSAKTTPPKLEEGEFSEARVDIVLTQSPASLAVSLGQRATISCRASESVDNYGISFMNWFQQKPGQPPKLLIYAASRQGSGVPARFSGSGSGTDFSLNIHPMEEDDTAMYFCQQSKEVPWTFGGGTKLEIKDLEPKSCDKTHTCPPCPDPKFWVLVVVGGVLACYSLLVTVAFIIFWVRSKRSRLLHSDYMNMTPRRPGPTRKHYQPYAPPRDFAAYRSRVKFSRSADAPAYQQGQNQLYNELNLGRREEYDVLDKRRGRDPEMGGKPRRKNPQEGLYNELQKDKMAEAYSEIGMKGERRRGKGHDGLYQGLSTATKDTYDALHMQALPPR

SEQ ID NO: 2268 - protein, 487 aa, Artificial Sequence
  source: /note="Description of Artificial Sequence: Synthetic Chimeric Antigen Receptor sequence"
MVLLVTSLLLCELPHPAFLLIPDIQQVQLQQSGPELEKPGASVKISCKASGYSFTGYTMNWVKQSHGKSLEWIGLITPYNGASSYNQKFRGKATLTVDKSSSTAYMDLLSLTSEDSAVYFCARGGYDGRGFDYWGQGTTVTVSSGGGGSGGGGSGGGGSDIELTQSPAIMSASPGEKVTMTCSASSSVSYMHWYQQKSGTSPKRWIYDTSKLASGVPGRFSGSGSGNSYSLTISSVEAEDDATYYCQQWSGYPLTFGAGTKLEIKAAAIEVMYPPPYLDNEKSNGTIIHVKGKHLCPSPLFPGPSKPFWVLVVVGGVLACYSLLVTVAFIIFWVRSKRSRLLHSDYMNMTPRRPGPTRKHYQPYAPPRDFAAYRSRVKFSRSADAPAYQQGQNQLYNELNLGRREEYDVLDKRRGRDPEMGGKPRRKNPQEGLYNELQKDKMAEAYSEIGMKGERRRGKGHDGLYQGLSTATKDTYDALHMQALPPR

SEQ ID NO: 2269 - protein, 688 aa, Artificial Sequence
  source: /note="Description of Artificial Sequence: Synthetic Chimeric Antigen Receptor sequence"
MDWIWRILFLVGAATGAHSQVQLQQPGAELVRPGASVKLSCKASGYTFSNYLMNWVKQRPEQDLDWIGRIDPYDGDIDYNQNFKDKAILTVDKSSSTAYMQLSSLTSEDSAVYYCARGYGTAYGVDYWGQGTSVTVSSAKTTPPKLEEGEFSEARVDIVLTQSPASLAVSLGQRATISCRASESVDNYGISFMNWFQQKPGQPPKLLIYAASRQGSGVPARFSGSGSGTDFSLNIHPMEEDDTAMYFCQQSKEVPWTFGGGTKLEIKAEDPAEPKSPDKTHTCPPCPAPELLGGPSVFLFPPKPKDTLMISRTPEVTCVVVDVSHEDPEVKFNWYVDGVEVHNAKTKPREEQYNSTYRVVSVLTVLHQDWLNGKEYKCKVSNKALPAPIEKTISKAKGQPREPQVYTLPPSRDELTKNQVSLTCLVKGFYPSDIAVEWESNGQPENNYKTTPPVLDSDGSFFLYSKLTVDKSRWQQGNVFSCSVMHEALHNHYTQKSLSLSPGKKDPKFWVLVVVGGVLACYSLLVTVAFIIFWVRSKRSRLLHSDYMNMTPRRPGPTRKHYQPYAPPRDFAAYRSRVKFSRSADAPAYQQGQNQLYNELNLGRREEYDVLDKRRGRDPEMGGKPRRKNPQEGLYNELQKDKMAEAYSEIGMKGERRRGKGHDGLYQGLSTATKDTYDALHMQALPPR

SEQ ID NO: 2270 - protein, 340 aa, Artificial Sequence
  source: /note="Description of Artificial Sequence: Synthetic Chimeric Antigen Receptor sequence"
GPVPPSTALRYLIEELVNITQNQKAPLCNGSMVWSINLTAGMYCAALESLINVSGCSAIEKTQRMLSGFCPHKVSAGQFSSLHVRDTKIEVAQFVKDLLLHLKKLFREGRFNAKPTTTPAPRPPTPAPTIASQPLSLRPEACRPAAGGAVHTRGLDFACDIYIWAPLAGTCGVLLLSLVITLYKRGRKKLLYIFKQPFMRPVQTTQEEDGCSCRFPEEEEGGCELGGGRVKFSRSADAPAYQQGQNQLYNELNLGRREEYDVLDKRRGRDPEMGGKPRRKNPQEGLYNELQKDKMAEAYSEIGMKGERRRGKGHDGLYQGLSTATKDTYDALHMQALPPR

SEQ ID NO: 2271 - protein, 341 aa, Artificial Sequence
  source: /note="Description of Artificial Sequence: Synthetic Chimeric Antigen Receptor sequence"
GPVPPSTALRYLIEELVNITQNQKAPLCNGSMVWSINLTAGMYCAALESLINVSGCSAIEKTQRMLSGFCPHKVSAGQFSSLHVRDTKIEVAQFVKDLLLHLKKLFREGRFNAKPTTTPAPRPPTPAPTIASQPLSLRPEACRPAAGGAVHTRGLDFACDIYIWAPLAGTCGVLLLSLVITGGGKRGRKKLLYIFKQPFMRPVQTTQEEDGCSCRFPEEEEGGCELGGGRVKFSRSADAPAYQQGQNQLYNELNLGRREEYDVLDKRRGRDPEMGGKPRRKNPQEGLYNELQKDKMAEAYSEIGMKGERRRGKGHDGLYQGLSTATKDTYDALHMQALPPR

SEQ ID NO: 2272 - protein, 351 aa, Artificial Sequence
  source: /note="Description of Artificial Sequence: Synthetic Chimeric Antigen Receptor sequence"
GPVPPSTALRYLIEELVNITQNQKAPLCNGSMVWSINLTAGMYCAALESLINVSGCSAIEKTQRMLSGFCPHKVSAGQFSSLHVRDTKIEVAQFVKDLLLHLKKLFREGRFNGGGSSGGGSGMFWVLVVVGGVLACYSLLVTVAFIIFWVRSKRSRGGHSDYMNMTPRRPGPTRKHYQPYAPPRDFAAYRSGGGKRGRKKLLYIFKQPFMRPVQTTQEEDGCSCRFPEEEEGGCELGGGRVKFSRSADAPAYQQGQNQLYNELNLGRREEYDVLDKRRGRDPEMGGKPRRKNPQEGLYNELQKDKMAEAYSEIGMKGERRRGKGHDGLYQGLSTATKDTYDALHMQALPPR

SEQ ID NO: 2273 - protein, 362 aa, Artificial Sequence
  source: /note="Description of Artificial Sequence: Synthetic Chimeric Antigen Receptor sequence"
MLLLVTSLLLCELPHPAFLLIPGPVPPSTALRYLIEELVNITQNQKAPLCNGSMVWSINLTAGMYCAALESLINVSGCSAIEKTQRMLSGFCPHKVSAGQFSSLHVRDTKIEVAQFVKDLLLHLKKLFREGRFNAKPTTTPAPRPPTPAPTIASQPLSLRPEACRPAAGGAVHTRGLDFACDIYIWAPLAGTCGVLLLSLVITLYKRGRKKLLYIFKQPFMRPVQTTQEEDGCSCRFPEEEEGGCELGGGRVKFSRSADAPAYQQGQNQLYNELNLGRREEYDVLDKRRGRDPEMGGKPRRKNPQEGLYNELQKDKMAEAYSEIGMKGERRRGKGHDGLYQGLSTATKDTYDALHMQALPPR

SEQ ID NO: 2274 - protein, 363 aa, Artificial Sequence
  source: /note="Description of Artificial Sequence: Synthetic Chimeric Antigen Receptor sequence"
GPVPPSTALRYLIEELVNITQNQKAPLCNGSMVWSINLTAGMYCAALESLINVSGCSAIEKTQRMLSGFCPHKVSAGQFSSLHVRDTKIEVAQFVKDLLLHLKKLFREGRFNESKYGPPCPPCPGGGSSGGGSGMFWVLVVVGGVLACYSLLVTVAFIIFWVRSKRSRGGHSDYMNMTPRRPGPTRKHYQPYAPPRDFAAYRSGGGKRGRKKLLYIFKQPFMRPVQTTQEEDGCSCRFPEEEEGGCELGGGRVKFSRSADAPAYQQGQNQLYNELNLGRREEYDVLDKRRGRDPEMGGKPRRKNPQEGLYNELQKDKMAEAYSEIGMKGERRRGKGHDGLYQGLSTATKDTYDALHMQALPPR

SEQ ID NO: 2275 - protein, 363 aa, Artificial Sequence
  source: /note="Description of Artificial Sequence: Synthetic Chimeric Antigen Receptor sequence"
MLLLVTSLLLCELPHPAFLLIPGPVPPSTALRYLIEELVNITQNQKAPLCNGSMVWSINLTAGMYCAALESLINVSGCSAIEKTQRMLSGFCPHKVSAGQFSSLHVRDTKIEVAQFVKDLLLHLKKLFREGRFNAKPTTTPAPRPPTPAPTIASQPLSLRPEACRPAAGGAVHTRGLDFACDIYIWAPLAGTCGVLLLSLVITGGGKRGRKKLLYIFKQPFMRPVQTTQEEDGCSCRFPEEEEGGCELGGGRVKFSRSADAPAYQQGQNQLYNELNLGRREEYDVLDKRRGRDPEMGGKPRRKNPQEGLYNELQKDKMAEAYSEIGMKGERRRGKGHDGLYQGLSTATKDTYDALHMQALPPR

SEQ ID NO: 2276 - protein, 373 aa, Artificial Sequence
  source: /note="Description of Artificial Sequence: Synthetic Chimeric Antigen Receptor sequence"
MLLLVTSLLLCELPHPAFLLIPGPVPPSTALRYLIEELVNITQNQKAPLCNGSMVWSINLTAGMYCAALESLINVSGCSAIEKTQRMLSGFCPHKVSAGQFSSLHVRDTKIEVAQFVKDLLLHLKKLFREGRFNGGGSSGGGSGMFWVLVVVGGVLACYSLLVTVAFIIFWVRSKRSRGGHSDYMNMTPRRPGPTRKHYQPYAPPRDFAAYRSGGGKRGRKKLLYIFKQPFMRPVQTTQEEDGCSCRFPEEEEGGCELGGGRVKFSRSADAPAYQQGQNQLYNELNLGRREEYDVLDKRRGRDPEMGGKPRRKNPQEGLYNELQKDKMAEAYSEIGMKGERRRGKGHDGLYQGLSTATKDTYDALHMQALPPR

SEQ ID NO: 2277 - protein, 385 aa, Artificial Sequence
  source: /note="Description of Artificial Sequence: Synthetic Chimeric Antigen Receptor sequence"
MLLLVTSLLLCELPHPAFLLIPGPVPPSTALRYLIEELVNITQNQKAPLCNGSMVWSINLTAGMYCAALESLINVSGCSAIEKTQRMLSGFCPHKVSAGQFSSLHVRDTKIEVAQFVKDLLLHLKKLFREGRFNESKYGPPCPPCPGGGSSGGGSGMFWVLVVVGGVLACYSLLVTVAFIIFWVRSKRSRGGHSDYMNMTPRRPGPTRKHYQPYAPPRDFAAYRSGGGKRGRKKLLYIFKQPFMRPVQTTQEEDGCSCRFPEEEEGGCELGGGRVKFSRSADAPAYQQGQNQLYNELNLGRREEYDVLDKRRGRDPEMGGKPRRKNPQEGLYNELQKDKMAEAYSEIGMKGERRRGKGHDGLYQGLSTATKDTYDALHMQALPPR

SEQ ID NO: 2278 - protein, 388 aa, Artificial Sequence
  source: /note="Description of Artificial Sequence: Synthetic Chimeric Antigen Receptor sequence"
GPVPPSTALRYLIEELVNITQNQKAPLCNGSMVWSINLTAGMYCAALESLINVSGCSAIEKTQRMLSGFCPHKVSAGQFSSLHVRDTKIEVAQFVKDLLLHLKKLFREGRFNAKPTTTPAPRPPTPAPTIASQPLSLRPEACRPAAGGAVHTRGLDFACDFWVLVVVGGVLACYSLLVTVAFIIFWVRSKRSRGGHSDYMNMTPRRPGPTRKHYQPYAPPRDFAAYRSGGGKRGRKKLLYIFKQPFMRPVQTTQEEDGCSCRFPEEEEGGCELGGGRVKFSRSADAPAYQQGQNQLYNELNLGRREEYDVLDKRRGRDPEMGGKPRRKNPQEGLYNELQKDKMAEAYSEIGMKGERRRGKGHDGLYQGLSTATKDTYDALHMQALPPR

SEQ ID NO: 2279 - protein, 410 aa, Artificial Sequence
  source: /note="Description of Artificial Sequence: Synthetic Chimeric Antigen Receptor sequence"
MLLLVTSLLLCELPHPAFLLIPGPVPPSTALRYLIEELVNITQNQKAPLCNGSMVWSINLTAGMYCAALESLINVSGCSAIEKTQRMLSGFCPHKVSAGQFSSLHVRDTKIEVAQFVKDLLLHLKKLFREGRFNAKPTTTPAPRPPTPAPTIASQPLSLRPEACRPAAGGAVHTRGLDFACDFWVLVVVGGVLACYSLLVTVAFIIFWVRSKRSRGGHSDYMNMTPRRPGPTRKHYQPYAPPRDFAAYRSGGGKRGRKKLLYIFKQPFMRPVQTTQEEDGCSCRFPEEEEGGCELGGGRVKFSRSADAPAYQQGQNQLYNELNLGRREEYDVLDKRRGRDPEMGGKPRRKNPQEGLYNELQKDKMAEAYSEIGMKGERRRGKGHDGLYQGLSTATKDTYDALHMQALPPR

SEQ ID NO: 2280 - protein, 420 aa, Artificial Sequence
  source: /note="Description of Artificial Sequence: Synthetic Chimeric Antigen Receptor sequence"
GPVPPSTALRYLIEELVNITQNQKAPLCNGSMVWSINLTAGMYCAALESLINVSGCSAIEKTQRMLSGFCPHKVSAGQFSSLHVRDTKIEVAQFVKDLLLHLKKLFREGRFNESKYGPPCPPCPGGGSSGGGSGGQPREPQVYTLPPSQEEMTKNQVSLTCLVKGFYPSDIAVEWESNGQPENNYKTTPPVLDSDGSFFLYSRLTVDKSRWQEGNVFSCSVMHEALHNHYTQKSLSLSLGKMALIVLGGVAGLLLFIGLGIFFKRGRKKLLYIFKQPFMRPVQTTQEEDGCSCRFPEEEEGGCELGGGRVKFSRSADAPAYQQGQNQLYNELNLGRREEYDVLDKRRGRDPEMGGKPRRKNPQEGLYNELQKDKMAEAYSEIGMKGERRRGKGHDGLYQGLSTATKDTYDALHMQALPPR

SEQ ID NO: 2281 - protein, 442 aa, Artificial Sequence
  source: /note="Description of Artificial Sequence: Synthetic Chimeric Antigen Receptor sequence"
MLLLVTSLLLCELPHPAFLLIPGPVPPSTALRYLIEELVNITQNQKAPLCNGSMVWSINLTAGMYCAALESLINVSGCSAIEKTQRMLSGFCPHKVSAGQFSSLHVRDTKIEVAQFVKDLLLHLKKLFREGRFNESKYGPPCPPCPGGGSSGGGSGGQPREPQVYTLPPSQEEMTKNQVSLTCLVKGFYPSDIAVEWESNGQPENNYKTTPPVLDSDGSFFLYSRLTVDKSRWQEGNVFSCSVMHEALHNHYTQKSLSLSLGKMALIVLGGVAGLLLFIGLGIFFKRGRKKLLYIFKQPFMRPVQTTQEEDGCSCRFPEEEEGGCELGGGRVKFSRSADAPAYQQGQNQLYNELNLGRREEYDVLDKRRGRDPEMGGKPRRKNPQEGLYNELQKDKMAEAYSEIGMKGERRRGKGHDGLYQGLSTATKDTYDALHMQALPPR

SEQ ID NO: 2282 - protein, 470 aa, Artificial Sequence
  source: /note="Description of Artificial Sequence: Synthetic Chimeric Antigen Receptor sequence"
GPVPPSTALRYLIEELVNITQNQKAPLCNGSMVWSINLTAGMYCAALESLINVSGCSAIEKTQRMLSGFCPHKVSAGQFSSLHVRDTKIEVAQFVKDLLLHLKKLFREGRFNESKYGPPCPPCPGGGSSGGGSGGQPREPQVYTLPPSQEEMTKNQVSLTCLVKGFYPSDIAVEWESNGQPENNYKTTPPVLDSDGSFFLYSRLTVDKSRWQEGNVFSCSVMHEALHNHYTQKSLSLSLGKMFWVLVVVGGVLACYSLLVTVAFIIFWVRSKRSRGGHSDYMNMTPRRPGPTRKHYQPYAPPRDFAAYRSGGGKRGRKKLLYIFKQPFMRPVQTTQEEDGCSCRFPEEEEGGCELGGGRVKFSRSADAPAYQQGQNQLYNELNLGRREEYDVLDKRRGRDPEMGGKPRRKNPQEGLYNELQKDKMAEAYSEIGMKGERRRGKGHDGLYQGLSTATKDTYDALHMQALPPR

SEQ ID NO: 2283 - protein, 492 aa, Artificial Sequence
  source: /note="Description of Artificial Sequence: Synthetic Chimeric Antigen Receptor sequence"
MLLLVTSLLLCELPHPAFLLIPGPVPPSTALRYLIEELVNITQNQKAPLCNGSMVWSINLTAGMYCAALESLINVSGCSAIEKTQRMLSGFCPHKVSAGQFSSLHVRDTKIEVAQFVKDLLLHLKKLFREGRFNESKYGPPCPPCPGGGSSGGGSGGQPREPQVYTLPPSQEEMTKNQVSLTCLVKGFYPSDIAVEWESNGQPENNYKTTPPVLDSDGSFFLYSRLTVDKSRWQEGNVFSCSVMHEALHNHYTQKSLSLSLGKMFWVLVVVGGVLACYSLLVTVAFIIFWVRSKRSRGGHSDYMNMTPRRPGPTRKHYQPYAPPRDFAAYRSGGGKRGRKKLLYIFKQPFMRPVQTTQEEDGCSCRFPEEEEGGCELGGGRVKFSRSADAPAYQQGQNQLYNELNLGRREEYDVLDKRRGRDPEMGGKPRRKNPQEGLYNELQKDKMAEAYSEIGMKGERRRGKGHDGLYQGLSTATKDTYDALHMQALPPR

SEQ ID NO: 2284 - protein, 519 aa, Artificial Sequence
  source: /note="Description of Artificial Sequence: Synthetic Chimeric Antigen Receptor sequence"
GPVPPSTALRYLIEELVNITQNQKAPLCNGSMVWSINLTAGMYCAALESLINVSGCSAIEKTQRMLSGFCPHKVSAGQFSSLHVRDTKIEVAQFVKDLLLHLKKLFREGRFNESKYGPPCPPCPAPEFEGGPSVFLFPPKPKDTLMISRTPEVTCVVVDVSQEDPEVQFNWYVDGVEVHNAKTKPREEQFQSTYRVVSVLTVLHQDWLNGKEYKCKVSNKGLPSSIEKTISKAKGQPREPQVYTLPPSQEEMTKNQVSLTCLVKGFYPSDIAVEWESNGQPENNYKTTPPVLDSDGSFFLYSRLTVDKSRWQEGNVFSCSVMHEALHNHYTQKSLSLSLGKIYIWAPLAGTCGVLLLSLVITKRGRKKLLYIFKQPFMRPVQTTQEEDGCSCRFPEEEEGGCELGGGRVKFSRSADAPAYQQGQNQLYNELNLGRREEYDVLDKRRGRDPEMGGKPRRKNPQEGLYNELQKDKMAEAYSEIGMKGERRRGKGHDGLYQGLSTATKDTYDALHMQALPPR

SEQ ID NO: 2285 - protein, 541 aa, Artificial Sequence
  source: /note="Description of Artificial Sequence: Synthetic Chimeric Antigen Receptor sequence"
MLLLVTSLLLCELPHPAFLLIPGPVPPSTALRYLIEELVNITQNQKAPLCNGSMVWSINLTAGMYCAALESLINVSGCSAIEKTQRMLSGFCPHKVSAGQFSSLHVRDTKIEVAQFVKDLLLHLKKLFREGRFNESKYGPPCPPCPAPEFEGGPSVFLFPPKPKDTLMISRTPEVTCVVVDVSQEDPEVQFNWYVDGVEVHNAKTKPREEQFQSTYRVVSVLTVLHQDWLNGKEYKCKVSNKGLPSSIEKTISKAKGQPREPQVYTLPPSQEEMTKNQVSLTCLVKGFYPSDIAVEWESNGQPENNYKTTPPVLDSDGSFFLYSRLTVDKSRWQEGNVFSCSVMHEALHNHYTQKSLSLSLGKIYIWAPLAGTCGVLLLSLVITKRGRKKLLYIFKQPFMRPVQTTQEEDGCSCRFPEEEEGGCELGGGRVKFSRSADAPAYQQGQNQLYNELNLGRREEYDVLDKRRGRDPEMGGKPRRKNPQEGLYNELQKDKMAEAYSEIGMKGERRRGKGHDGLYQGLSTATKDTYDALHMQALPPR

SEQ ID NO: 2286 - protein, 570 aa, Artificial Sequence
  source: /note="Description of Artificial Sequence: Synthetic Chimeric Antigen Receptor sequence"
GPVPPSTALRYLIEELVNITQNQKAPLCNGSMVWSINLTAGMYCAALESLINVSGCSAIEKTQRMLSGFCPHKVSAGQFSSLHVRDTKIEVAQFVKDLLLHLKKLFREGRFNESKYGPPCPPCPAPEFEGGPSVFLFPPKPKDTLMISRTPEVTCVVVDVSQEDPEVQFNWYVDGVEVHNAKTKPREEQFQSTYRVVSVLTVLHQDWLNGKEYKCKVSNKGLPSSIEKTISKAKGQPREPQVYTLPPSQEEMTKNQVSLTCLVKGFYPSDIAVEWESNGQPENNYKTTPPVLDSDGSFFLYSRLTVDKSRWQEGNVFSCSVMHEALHNHYTQKSLSLSLGKMFWVLVVVGGVLACYSLLVTVAFIIFWVRSKRSRGGHSDYMNMTPRRPGPTRKHYQPYAPPRDFAAYRSGGGKRGRKKLLYIFKQPFMRPVQTTQEEDGCSCRFPEEEEGGCELGGGRVKFSRSADAPAYQQGQNQLYNELNLGRREEYDVLDKRRGRDPEMGGKPRRKNPQEGLYNELQKDKMAEAYSEIGMKGERRRGKGHDGLYQGLSTATKDTYDALHMQALPPR

SEQ ID NO: 2287 - protein, 592 aa, Artificial Sequence
  source: /note="Description of Artificial Sequence: Synthetic Chimeric Antigen Receptor sequence"
MLLLVTSLLLCELPHPAFLLIPGPVPPSTALRYLIEELVNITQNQKAPLCNGSMVWSINLTAGMYCAALESLINVSGCSAIEKTQRMLSGFCPHKVSAGQFSSLHVRDTKIEVAQFVKDLLLHLKKLFREGRFNESKYGPPCPPCPAPEFEGGPSVFLFPPKPKDTLMISRTPEVTCVVVDVSQEDPEVQFNWYVDGVEVHNAKTKPREEQFQSTYRVVSVLTVLHQDWLNGKEYKCKVSNKGLPSSIEKTISKAKGQPREPQVYTLPPSQEEMTKNQVSLTCLVKGFYPSDIAVEWESNGQPENNYKTTPPVLDSDGSFFLYSRLTVDKSRWQEGNVFSCSVMHEALHNHYTQKSLSLSLGKMFWVLVVVGGVLACYSLLVTVAFIIFWVRSKRSRGGHSDYMNMTPRRPGPTRKHYQPYAPPRDFAAYRSGGGKRGRKKLLYIFKQPFMRPVQTTQEEDGCSCRFPEEEEGGCELGGGRVKFSRSADAPAYQQGQNQLYNELNLGRREEYDVLDKRRGRDPEMGGKPRRKNPQEGLYNELQKDKMAEAYSEIGMKGERRRGKGHDGLYQGLSTATKDTYDALHMQALPPR

SEQ ID NO: 2288 - protein, 688 aa, Artificial Sequence
  source: /note="Description of Artificial Sequence: Synthetic Chimeric Antigen Receptor sequence"
MEFGLSWLFLVAILKGVQCSRDIVMTQSQKFMSTSVGDRVSVTCKASQNVGTNVAWYQQKPGQSPKALIYSTSYRYSGVPDRFTGSGSGTDFTLTISNVQSEDLAEYFCQQYNSYPYTFGGGTKLEIKGGGGSGGGGSGGGGSEVQLQQSGAELVKPGASVKLSCTASGFNIKDTYMHWVKQRPEQGLEWIGRIDPANGNTKYDPKFQGKATIIADTSSNTAYLQLSSLTSEDTAVYYCARGVYHDYDGDYWGQGTTLTVSSYVTVSSQDPAEPKSPDKTHTCPPCPAPELLGGPSVFLFPPKPKDTLMISRTPEVTCVVVDVSHEDPEVKFNWYVDGVEVHNAKTKPREEQYNSTYRVVSVLTVLHQDWLNGKEYKCKVSNKALPAPIEKTISKAKGQPREPQVYTLPPSRDELTKNQVSLTCLVKGFYPSDIAVEWESNGQPENNYKTTPPVLDSDGSFFLYSKLTVDKSRWQQGNVFSCSVMHEALHNHYTQKSLSLSPGKKDPKFWVLVVVGGVLACYSLLVTVAFIIFWVRSKRSRLLHSDYMNMTPRRPGPTRKHYQPYAPPRDFAAYRSRVKFSRSADAPAYQQGQNQLYNELNLGRREEYDVLDKRRGRDPEMGGKPRRKNPQEGLYNELQKDKMAEAYSEIGMKGERRRGKGHDGLYQGLSTATKDTYDALHMQALPPR

SEQ ID NO: 2289 - protein, 488 aa, Artificial Sequence
  source: /note="Description of Artificial Sequence: Synthetic Chimeric Antigen Receptor sequence"
MALPVTALLLPLALLLHAARPGSQVQLQQSGPELEKPGASVKISCKASGYSFTGYTMNWVKQSHGKSLEWIGLITPYNGASSYNQKFRGKATLTVDKSSSTAYMDLLSLTSEDSAVYFCARGGYDGRGFDYWGQGTTVTVSSGGGGSGGGGSSGGGSDIELTQSPAIMSASPGEKVTMTCSASSSVSYMHWYQQKSGTSPKRWIYDTSKLASGVPGRFSGSGSGNSYSLTISSVEAEDDATYYCQQWSKHPLTYGAGTKLEIKASTTTPAPRPPTPAPTIASQPLSLRPEACRPAAGGAVHTRGLDFACDIYIWAPLAGTCGVLLLSLVITLYCKRGRKKLLYIFKQPFMRPVQTTQEEDGCSCRFPEEEEGGCELRVKFSRSADAPAYKQGQNQLYNELNLGRREEYDVLDKRRGRDPEMGGKPRRKNPQEGLYNELQKDKMAEAYSEIGMKGERRRGKGHDGLYQGLSTATKDTYDALHMQALPPR

SEQ ID NO: 2290 - protein, 480 aa, Artificial Sequence
  source: /note="Description of Artificial Sequence: Synthetic polypeptide"
MALPVTALLLPLALLLHAARPQVQLVQSGGGLVQPGRSLRLSCAASGFTFDDYAMHWVRQAPGKGLEWVSGISWNSGSIGYADSVKGRFTISRDNAKNSLYLQMNSLRAEDTAVYYCAKDGSSSWSWGYFDYWGQGTLVTVSSGGGGSGGGGSGGGGSSSELTQDPAVSVALGQTVRTTCQGDALRSYYASWYQQKPGQAPMLVIYGKNNRPSGIPDRFSGSDSGDTASLTITGAQAEDEADYYCNSRDSSGYPVFGTGTKVTVLTTTPAPRPPTPAPTIASQPLSLRPEACRPAAGGAVHTRGLDFACDIYIWAPLAGTCGVLLLSLVITLYCKRGRKKLLYIFKQPFMRPVQTTQEEDGCSCRFPEEEEGGCELRVKFSRSADAPAYKQGQNQLYNELNLGRREEYDVLDKRRGRDPEMGGKPRRKNPQEGLYNELQKDKMAEAYSEIGMKGERRRGKGHDGLYQGLSTATKDTYDAL

SEQ ID NO: 2291 - protein, 445 aa, Artificial Sequence
  source: /note="Description of Artificial Sequence: Synthetic Chimeric Antigen Receptor sequence"
MALPVTALLLPLALLLHAARPEVQLVESGGGLVKPGGSLRLSCAASGFTFSRYGMSWVRQAPGKRLEWVSTISGGGTYIYYPDSVKGRFTISRDNAKNTLYLQMNSLRAEDTAVYYCTRDNYGRNYDYGMDYWGQGTLVTVSSGGGGSGGGGSGGGGSEIVLTQSPATLSLSPGERATLTCSATSSVSYIHWYQQRPGQSPRLLIYSTSNLASGIPARFSGSGSGSDYTLTISSLEPEDFAVYYCQQRSSSPFTFGSGTKVEIKTTTPAPRPPTPAPTIASQPLSLRPEACRPAAGGAVHTRGLDFACDIYIWAPLAGTCGVLLLSLVITLYCRVKFSRSADAPAYKQGQNQLYNELNLGRREEYDVLDKRRGRDPEMGGKPRRKNPQEGLYNELQKDKMAEAYSEIGMKGERRRGKGHDGLYQGLSTATKDTYDALHMQALPPR

SEQ ID NO: 2292 - protein, 464 aa, Artificial Sequence
  source: /note="Description of Artificial Sequence: Synthetic Chimeric Antigen Receptor sequence"
MALPVTALLLPLALLLHAARPGSQVQLQQSGPGLVTPSQTLSLTCAISGDSVSSNSATWNWIRQSPSRGLEWLGRTYYRSKWYNDYAVSVKSRMSINPDTSKNQFSLQLNSVTPEDTAVYYCARGMMTYYYGMDVWGQGTTVTVSSGILGSGGGGSGGGGSGGGGSQPVLTQSSSLSASPGASASLTCTLRSGINVGPYRIYWYQQKPGSPPQYLLNYKSDSDKQQGSGVPSRFSGSKDASANAGVLLISGLRSEDEADYYCMIWHSSAAVFGGGTQLTVLSASTTTPAPRPPTPAPTIASRPLSLRPEACRPAAGGAVHTRGLDFACDIYIWAPLAGTCGVLLLSLVITLYCRVKFSRSADAPAYQQGQNQLYNELNLGRREEYDVLDKRRGRDPEMGGKPRRKNPQEGLYNELQKDKMAEAYSEIGMKGERRGKGHDGLYQGLSTARKDTYDALHMQALPPT

SEQ ID NO: 2293 - protein, 487 aa, Artificial Sequence
  source: /note="Description of Artificial Sequence: Synthetic Chimeric Antigen Receptor sequence"
MVLLVTSLLLCELPHPAFLLIPDIQQVQLQQSGPELEKPGASVKISCKASGYSFTGYTMNWVKQSHGKSLEWIGLITPYNGASSYNQKFRGKATLTVDKSSSTAYMDLLSLTSEDSAVYFCARGGYDGRGFDYWGQGTTVTVSSGGGGSGGGGSSGGGSDIELTQSPAIMSASPGEKVTMTCSASSSVSYMHWYQQKSGTSPKRWIYDTSKLASGVPGRFSGSGSGNSYSLTISSVEAEDDATYYCQQWSKHPLTFGAGTKLEIKAAAIEVMYPPPYLDNEKSNGTIIHVKGKHLCPSPLFPGPSKPFWVLVVVGGVLACYSLLVTVAFIIFWVRSKRSRLLHSDYMNMTPRRPGPTRKHYQPYAPPRDFAAYRSRVKFSRSADAPAYQQGQNQLYNELNLGRREEYDVLDKRRGRDPEMGGKPRRKNPQEGLYNELQKDKMAEAYSEIGMKGERRRGKGHDGLYQGLSTATKDTYDALHMQALPPR

SEQ ID NO: 2294 - protein, 490 aa, Artificial Sequence
  source: /note="Description of Artificial Sequence: Synthetic Chimeric Antigen Receptor sequence"
MVLLVTSLLLCELPHPAFLLIPDIQAQVQLVQSGAEVKRPGASVQVSCRASGYSINTYYMQWVRQAPGAGLEWMGVINPSGVTSYAQKFQGRVTLTNDTSTNTVYMQLNSLTSADTAVYYCARWALWGDFGMDVWGKGTLVTVSSGGGGSGGGGSGGGGSDIQMTQSPSTLSASIGDRVTITCRASEGIYHWLAWYQQKPGKAPKLLIYKASSLASGAPSRFSGSGSGTDFTLTISSLQPDDFATYYCQQYSNYPLTFGGGTKLEIKRAAAIEVMYPPPYLDNEKSNGTIIHVKGKHLCPSPLFPGPSKPFWVLVVVGGVLACYSLLVTVAFIIFWVRSKRSRLLHSDYMNMTPRRPGPTRKHYQPYAPPRDFAAYRSRVKFSRSADAPAYQQGQNQLYNELNLGRREEYDVLDKRRGRDPEMGGKPRRKNPQEGLYNELQKDKMAEAYSEIGMKGERRRGKGHDGLYQGLSTATKDTYDALHMQALPPR

SEQ ID NO: 2295 - protein, 507 aa, Artificial Sequence
  source: /note="Description of Artificial Sequence: Synthetic Chimeric Antigen Receptor sequence"
MALPVTALLLPLALLLHAARPGSQVQLQQSGPGLVTPSQTLSLTCAISGDSVSSNSATWNWIRQSPSRGLEWLGRTYYRSKWYNDYAVSVKSRMSINPDTSKNQFSLQLNSVTPEDTAVYYCARGMMTYYYGMDVWGQGTTVTVSSGILGSGGGGSGGGGSGGGGSQPVLTQSSSLSASPGASASLTCTLRSGINVGPYRIYWYQQKPGSPPQYLLNYKSDSDKQQGSGVPSRFSGSKDASANAGVLLISGLRSEDEADYYCMIWHSSAAVFGGGTQLTVLSASTTTPAPRPPTPAPTIASQPLSLRPEACRPAAGGAVHTRGLDFACDIYIWAPLAGTCGVLLLSLVITLYCKRGRKKLLYIFKQPFMRPVQTTQEEDGCSCRFPEEEEGGCELRVKFSRSADAPAYKQGQNQLYNELNLGRREEYDVLDKRRGRDPEMGGKPRRKNPQEGLYNELQKDKMAEAYSEIGMKGERRRGKGHDGLYQGLSTATKDTYDALHMQALPPR

SEQ ID NO: 2296 - protein, 511 aa, Artificial Sequence
  source: /note="Description of Artificial Sequence: Synthetic Chimeric Antigen Receptor sequence"
MALPVTALLLPLALLLHAARPGSQVQLQQSGPGLVTPSQTLSLTCAISGDSVSSNSATWNWIRQSPSRGLEWLGRTYYRSKWYNDYAVSVKSRMSINPDTSKNQFSLQLNSVTPEDTAVYYCARGMMTYYYGMDVWGQGTTVTVSSGILGSGGGGSGGGGSGGGGSQPVLTQSSSLSASPGASASLTCTLRSGINVGPYRIYWYQQKPGSPPQYLLNYKSDSDKQQGSGVPSRFSGSKDASANAGVLLISGLRSEDEADYYCMIWHSSAAVFGGGTQLTVLSASTTTPAPRPPTPAPTIASQPLSLRPEACRPAAGGAVHTRGLDFACDFWVLVVVGGVLACYSLLVTVAFIIFWVRSKRSRLLHSDYMNMTPRRPGPTRKHYQPYAPPRDFAAYRSIDRVKFSRSADAPAYQQGQNQLYNELNLGRREEYDVLDKRRGRDPEMGGKPRRKNPQEGLYNELQKDKMAEAYSEIGMKGERRRGKGHDGLYQGLSTATKDTYDALHMQALPPR

SEQ ID NO: 2297 - protein, 551 aa, Artificial Sequence
  source: /note="Description of Artificial Sequence: Synthetic Chimeric Antigen Receptor sequence"
MVLLVTSLLLCELPHPAFLLIPDIQQVQLQQSGPELEKPGASVKISCKASGYSFTGYTMNWVKQSHGKSLEWIGLITPYNGASSYNQKFRGKATLTVDKSSSTAYMDLLSLTSEDSAVYFCARGGYDGRGFDYWGQGTTVTVSSGGGGSGGGGSGGGGSDIELTQSPAIMSASPGEKVTMTCSASSSVSYMHWYQQKSGTSPKRWIYDTSKLASGVPGRFSGSGSGNSYSLTISSVEAEDDATYYCQQWSGYPLTFGAGTKLEIKAAAFVPVFLPAKPTTTPAPRPPTPAPTIASQPLSLRPEACRPAAGGAVHTRGLDFACDIYIWAPLAGTCGVLLLSLVITLYCNHRNRSKRSRLLHSDYMNMTPRRPGPTRKHYQPYAPPRDFAAYRSRFSVVKRGRKKLLYIFKQPFMRPVQTTQEEDGCSCRFPEEEEGGCELRVKFSRSADAPAYQQGQNQLYNELNLGRREEYDVLDKRRGRDPEMGGKPRRKNPQEGLYNELQKDKMAEAYSEIGMKGERRRGKGHDGLYQGLSTATKDTYDALHMQALPPR

SEQ ID NO: 2298 - protein, 551 aa, Artificial Sequence
  source: /note="Description of Artificial Sequence: Synthetic Chimeric Antigen Receptor sequence"
MVLLVTSLLLCELPHPAFLLIPDIQQVQLQQSGPELEKPGASVKISCKASGYSFTGYTMNWVKQSHGKSLEWIGLITPYNGASSYNQKFRGKATLTVDKSSSTAYMDLLSLTSEDSAVYFCARGGYDGRGFDYWGQGTTVTVSSGGGGSGGGGSSGGGSDIELTQSPAIMSASPGEKVTMTCSASSSVSYMHWYQQKSGTSPKRWIYDTSKLASGVPGRFSGSGSGNSYSLTISSVEAEDDATYYCQQWSKHPLTFGAGTKLEIKAAAFVPVFLPAKPTTTPAPRPPTPAPTIASQPLSLRPEACRPAAGGAVHTRGLDFACDIYIWAPLAGTCGVLLLSLVITLYCNHRNRSKRSRLLHSDYMNMTPRRPGPTRKHYQPYAPPRDFAAYRSRFSVVKRGRKKLLYIFKQPFMRPVQTTQEEDGCSCRFPEEEEGGCELRVKFSRSADAPAYQQGQNQLYNELNLGRREEYDVLDKRRGRDPEMGGKPRRKNPQEGLYNELQKDKMAEAYSEIGMKGERRRGKGHDGLYQGLSTATKDTYDALHMQALPPR

SEQ ID NO: 2299 - protein, 554 aa, Artificial Sequence
  source: /note="Description of Artificial Sequence: Synthetic Chimeric Antigen Receptor sequence"
MVLLVTSLLLCELPHPAFLLIPDIQAQVQLVQSGAEVKRPGASVQVSCRASGYSINTYYMQWVRQAPGAGLEWMGVINPSGVTSYAQKFQGRVTLTNDTSTNTVYMQLNSLTSADTAVYYCARWALWGDFGMDVWGKGTLVTVSSGGGGSGGGGSGGGGSDIQMTQSPSTLSASIGDRVTITCRASEGIYHWLAWYQQKPGKAPKLLIYKASSLASGAPSRFSGSGSGTDFTLTISSLQPDDFATYYCQQYSNYPLTFGGGTKLEIKRAAAFVPVFLPAKPTTTPAPRPPTPAPTIASQPLSLRPEACRPAAGGAVHTRGLDFACDIYIWAPLAGTCGVLLLSLVITLYCNHRNRSKRSRLLHSDYMNMTPRRPGPTRKHYQPYAPPRDFAAYRSRFSVVKRGRKKLLYIFKQPFMRPVQTTQEEDGCSCRFPEEEEGGCELRVKFSRSADAPAYQQGQNQLYNELNLGRREEYDVLDKRRGRDPEMGGKPRRKNPQEGLYNELQKDKMAEAYSEIGMKGERRRGKGHDGLYQGLSTATKDTYDALHMQALPPR

SEQ ID NO: 2300 - protein, 738 aa, Artificial Sequence
  source: /note="Description of Artificial Sequence: Synthetic Chimeric Antigen Receptor sequence"
MALPVTALLLPLALLLHAARPEVQLQQSGGERATPGASVKMSCKTSGYTFTNYWMHWVKQRPGQGLEWIGYINPSSGYTQYNQKFKDKATLTADKSSSTAYIQLSSLTSEDSAVYYCSTYYGDYLFPYWGQGTLVTVSAGGGGSGGGGSGGGGSDVLMTQTPLSLPVSLGDQASISCRSSQDIVYGNGNTYLEWYLQKPGQSPKLLIYKVSNRFSGVPDRFSGSGSGTDFTLKISRVEAEDLGVYYCFQGSHVPYTFGGGTKLEIKRAAAIEVEQKLISEEDLLDNEKSNGTIIHVKGKHLCPSPLFPGPSKPFWVLVVVGGVLACYSLLVTVAFIIFWVRSKRSRLLHSDYMNMTPRRPGPTRKHYQPYAPPRDFAAYRSRVKFSRSADAPAYQQGQNQLYNELNLGRREEYDVLDKRRGRDPEMGGKPRRKNPQEGLYNELQKDKMAEAYSEIGMKGERRRGKGHDGLYQGLSTATKDTYDALHMQALPPRARGAAAGAGGAGRMVSELIKENMHMKLYMEGTVNNHHFKCTSEGEGKPYEGTQTMRIKAVEGGPLPFAFDILATSFMYGSKTFINHTQGIPDFFKQSFPEGFTWERVTTYEDGGVLTATQDTSLQDGCLIYNVKIRGVNFPSNGPVMQKKTLGWEASTETLYPADGGLEGRADMALKLVGGGHLICNLKTTYRSKKPAKNLKMPGVYYVDRRLERIKEADKETYVEQHEVAVARYCDLPSKLGHR

SEQ ID NO: 2301 - protein, 451 aa, Artificial Sequence
  source: /note="Description of Artificial Sequence: Synthetic Chimeric Antigen Receptor sequence"
MALPVTALLLPLALLLHAARPEVQLVESGGGLVKPGGSLRLSCAASGFTFSGYAMSWVRQAPGKGLEWVSTISSGGTYIYYPDSVKGRFTISRDNAKNSLYLQMNSLRAEDTAVYYCARLGGDNYYEYFDVWGKGTTVTVSSGGGGSGGGGSGGGGSDIVLTQSPASLAVSPGQRATITCRASKSVSTSGYSYMHWYQQKPGQPPKLLIYLASNLESGVPARFSGSGSGTDFTLTINPVEANDTANYYCQHSRELPFTFGGGTKVEIKRTTTTPAPRPPTPAPTIASQPLSLRPEACRPAAGGAVHTRGLDFACDIYIWAPLAGTCGVLLLSLVITLYCRVKFSRSADAPAYKQGQNQLYNELNLGRREEYDVLDKRRGRDPEMGGKPRRKNPQEGLYNELQKDKMAEAYSEIGMKGERRRGKGHDGLYQGLSTATKDTYDALHMQALPPR

SEQ ID NO: 2302 - protein, 482 aa, Artificial Sequence
  source: /note="Description of Artificial Sequence: Synthetic Chimeric Antigen Receptor sequence"
MALPVTALLLPLALLLHAARPEVQLVESGGGLVKPGGSLRLSCAASGFTFSRYGMSWVRQAPGKRLEWVSTISGGGTYIYYPDSVKGRFTISRDNAKNTLYLQMNSLRAEDTAVYYCTRDNYGRNYDYGMDYWGQGTLVTVSSGGGGSGGGGSGGGGSEIVLTQSPATLSLSPGERATLTCSATSSVSYIHWYQQRPGQSPRLLIYSTSNLASGIPARFSGSGSGSDYTLTISSLEPEDFAVYYCQQRSSSPFTFGSGTKVEIKTTTPAPRPPTPAPTIASQPLSLRPEACRPAAGGAVHTRGLDFACDIYIWAPLAGTCGVLLLSLVITLYCRRDQRLPPDAHKPPGGGSFRTPIQEEQADAHSTLAKIRVKFSRSADAPAYKQGQNQLYNELNLGRREEYDVLDKRRGRDPEMGGKPRRKNPQEGLYNELQKDKMAEAYSEIGMKGERRRGKGHDGLYQGLSTATKDTYDALHMQALPPR

SEQ ID NO: 2303 - protein, 486 aa, Artificial Sequence
  source: /note="Description of Artificial Sequence: Synthetic Chimeric Antigen Receptor sequence"
MALPVTALLLPLALLLHAARPEVQLVESGGGLVKPGGSLRLSCAASGFTFSRYGMSWVRQAPGKRLEWVSTISGGGTYIYYPDSVKGRFTISRDNAKNTLYLQMNSLRAEDTAVYYCTRDNYGRNYDYGMDYWGQGTLVTVSSGGGGSGGGGSGGGGSEIVLTQSPATLSLSPGERATLTCSATSSVSYIHWYQQRPGQSPRLLIYSTSNLASGIPARFSGSGSGSDYTLTISSLEPEDFAVYYCQQRSSSPFTFGSGTKVEIKTTTPAPRPPTPAPTIASQPLSLRPEACRPAAGGAVHTRGLDFACDIYIWAPLAGTCGVLLLSLVITLYCRSKRSRLLHSDYMNMTPRRPGPTRKHYQPYAPPRDFAAYRSRVKFSRSADAPAYKQGQNQLYNELNLGRREEYDVLDKRRGRDPEMGGKPRRKNPQEGLYNELQKDKMAEAYSEIGMKGERRRGKGHDGLYQGLSTATKDTYDALHMQALPPR

SEQ ID NO: 2304 - protein, 487 aa, Artificial Sequence
  source: /note="Description of Artificial Sequence: Synthetic Chimeric Antigen Receptor sequence"
MALPVTALLLPLALLLHAARPEVQLVESGGGLVKPGGSLRLSCAASGFTFSRYGMSWVRQAPGKRLEWVSTISGGGTYIYYPDSVKGRFTISRDNAKNTLYLQMNSLRAEDTAVYYCTRDNYGRNYDYGMDYWGQGTLVTVSSGGGGSGGGGSGGGGSEIVLTQSPATLSLSPGERATLTCSATSSVSYIHWYQQRPGQSPRLLIYSTSNLASGIPARFSGSGSGSDYTLTISSLEPEDFAVYYCQQRSSSPFTFGSGTKVEIKTTTPAPRPPTPAPTIASQPLSLRPEACRPAAGGAVHTRGLDFACDIYIWAPLAGTCGVLLLSLVITLYCKRGRKKLLYIFKQPFMRPVQTTQEEDGCSCRFPEEEEGGCELRVKFSRSADAPAYKQGQNQLYNELNLGRREEYDVLDKRRGRDPEMGGKPRRKNPQEGLYNELQKDKMAEAYSEIGMKGERRRGKGHDGLYQGLSTATKDTYDALHMQALPPR

SEQ ID NO: 2305 - protein, 488 aa, Artificial Sequence
  source: /note="Description of Artificial Sequence: Synthetic Chimeric Antigen Receptor sequence"
MALPVTALLLPLALLLHAARPEVQLVESGGGLVKPGGSLRLSCAASGFTFSGYAMSWVRQAPGKGLEWVSTISSGGTYIYYPDSVKGRFTISRDNAKNSLYLQMNSLRAEDTAVYYCARLGGDNYYEYFDVWGKGTTVTVSSGGGGSGGGGSGGGGSDIVLTQSPASLAVSPGQRATITCRASKSVSTSGYSYMHWYQQKPGQPPKLLIYLASNLESGVPARFSGSGSGTDFTLTINPVEANDTANYYCQHSRELPFTFGGGTKVEIKRTTTTPAPRPPTPAPTIASQPLSLRPEACRPAAGGAVHTRGLDFACDIYIWAPLAGTCGVLLLSLVITLYCRRDQRLPPDAHKPPGGGSFRTPIQEEQADAHSTLAKIRVKFSRSADAPAYKQGQNQLYNELNLGRREEYDVLDKRRGRDPEMGGKPRRKNPQEGLYNELQKDKMAEAYSEIGMKGERRRGKGHDGLYQGLSTATKDTYDALHMQALPPR

SEQ ID NO: 2306 - protein, 492 aa, Artificial Sequence
  source: /note="Description of Artificial Sequence: Synthetic Chimeric Antigen Receptor sequence"
MALPVTALLLPLALLLHAARPEVQLVESGGGLVKPGGSLRLSCAASGFTFSGYAMSWVRQAPGKGLEWVSTISSGGTYIYYPDSVKGRFTISRDNAKNSLYLQMNSLRAEDTAVYYCARLGGDNYYEYFDVWGKGTTVTVSSGGGGSGGGGSGGGGSDIVLTQSPASLAVSPGQRATITCRASKSVSTSGYSYMHWYQQKPGQPPKLLIYLASNLESGVPARFSGSGSGTDFTLTINPVEANDTANYYCQHSRELPFTFGGGTKVEIKRTTTTPAPRPPTPAPTIASQPLSLRPEACRPAAGGAVHTRGLDFACDIYIWAPLAGTCGVLLLSLVITLYCRSKRSRLLHSDYMNMTPRRPGPTRKHYQPYAPPRDFAAYRSRVKFSRSADAPAYKQGQNQLYNELNLGRREEYDVLDKRRGRDPEMGGKPRRKNPQEGLYNELQKDKMAEAYSEIGMKGERRRGKGHDGLYQGLSTATKDTYDALHMQALPPR

SEQ ID NO: 2307 - protein, 493 aa, Artificial Sequence
  source: /note="Description of Artificial Sequence: Synthetic Chimeric Antigen Receptor sequence"
MALPVTALLLPLALLLHAARPEVQLVESGGGLVKPGGSLRLSCAASGFTFSGYAMSWVRQAPGKGLEWVSTISSGGTYIYYPDSVKGRFTISRDNAKNSLYLQMNSLRAEDTAVYYCARLGGDNYYEYFDVWGKGTTVTVSSGGGGSGGGGSGGGGSDIVLTQSPASLAVSPGQRATITCRASKSVSTSGYSYMHWYQQKPGQPPKLLIYLASNLESGVPARFSGSGSGTDFTLTINPVEANDTANYYCQHSRELPFTFGGGTKVEIKRTTTTPAPRPPTPAPTIASQPLSLRPEACRPAAGGAVHTRGLDFACDIYIWAPLAGTCGVLLLSLVITLYCKRGRKKLLYIFKQPFMRPVQTTQEEDGCSCRFPEEEEGGCELRVKFSRSADAPAYKQGQNQLYNELNLGRREEYDVLDKRRGRDPEMGGKPRRKNPQEGLYNELQKDKMAEAYSEIGMKGERRRGKGHDGLYQGLSTATKDTYDALHMQALPPR

SEQ ID NO: 2308 - protein, 513 aa, Artificial Sequence
  source: /note="Description of Artificial Sequence: Synthetic Chimeric Antigen Receptor sequence"
EVQLVESGGGLVKPGGSLRLSCAASGFTFSGYAMSWVRQAPGKGLEWVSTISSGGTYIYYPDSVKGRFTISRDNAKNSLYLQMNSLRAEDTAVYYCARLGGDNYYEYFDVWGKGTTVTVSSGGGGSGGGGSGGGGSDIVLTQSPASLAVSPGQRATITCRASKSVSTSGYSYMHWYQQKPGQPPKLLIYLASNLESGVPARFSGSGSGTDFTLTINPVEANDTANYYCQHSRELPFTFGGGTKVEIKRTTTTPAPRPPTPAPTIASQPLSLRPEACRPAAGGAVHTRGLDFACDIYIWAPLAGTCGVLLLSLVITLYCRSKRSRLLHSDYMNMTPRRPGPTRKHYQPYAPPRDFAAYRSKRGRKKLLYIFKQPFMRPVQTTQEEDGCSCRFPEEEEGGCELRVKFSRSADAPAYKQGQNQLYNELNLGRREEYDVLDKRRGRDPEMGGKPRRKNPQEGLYNELQKDKMAEAYSEIGMKGERRRGKGHDGLYQGLSTATKDTYDALHMQALPPR

SEQ ID NO: 2309 - protein, 523 aa, Artificial Sequence
  source: /note="Description of Artificial Sequence: Synthetic Chimeric Antigen Receptor sequence"
MALPVTALLLPLALLLHAARPEVQLVESGGGLVKPGGSLRLSCAASGFTFSRYGMSWVRQAPGKRLEWVSTISGGGTYIYYPDSVKGRFTISRDNAKNTLYLQMNSLRAEDTAVYYCTRDNYGRNYDYGMDYWGQGTLVTVSSGGGGSGGGGSGGGGSEIVLTQSPATLSLSPGERATLTCSATSSVSYIHWYQQRPGQSPRLLIYSTSNLASGIPARFSGSGSGSDYTLTISSLEPEDFAVYYCQQRSSSPFTFGSGTKVEIKTTTPAPRPPTPAPTIASQPLSLRPEACRPAAGGAVHTRGLDFACDIYIWAPLAGTCGVLLLSLVITLYCRSKRSRLLHSDYMNMTPRRPGPTRKHYQPYAPPRDFAAYRSRRDQRLPPDAHKPPGGGSFRTPIQEEQADAHSTLAKIRVKFSRSADAPAYKQGQNQLYNELNLGRREEYDVLDKRRGRDPEMGGKPRRKNPQEGLYNELQKDKMAEAYSEIGMKGERRRGKGHDGLYQGLSTATKDTYDALHMQALPPR

SEQ ID NO: 2310 - protein, 528 aa, Artificial Sequence
  source: /note="Description of Artificial Sequence: Synthetic Chimeric Antigen Receptor sequence"
MALPVTALLLPLALLLHAARPEVQLVESGGGLVKPGGSLRLSCAASGFTFSRYGMSWVRQAPGKRLEWVSTISGGGTYIYYPDSVKGRFTISRDNAKNTLYLQMNSLRAEDTAVYYCTRDNYGRNYDYGMDYWGQGTLVTVSSGGGGSGGGGSGGGGSEIVLTQSPATLSLSPGERATLTCSATSSVSYIHWYQQRPGQSPRLLIYSTSNLASGIPARFSGSGSGSDYTLTISSLEPEDFAVYYCQQRSSSPFTFGSGTKVEIKTTTPAPRPPTPAPTIASQPLSLRPEACRPAAGGAVHTRGLDFACDIYIWAPLAGTCGVLLLSLVITLYCRSKRSRLLHSDYMNMTPRRPGPTRKHYQPYAPPRDFAAYRSKRGRKKLLYIFKQPFMRPVQTTQEEDGCSCRFPEEEEGGCELRVKFSRSADAPAYKQGQNQLYNELNLGRREEYDVLDKRRGRDPEMGGKPRRKNPQEGLYNELQKDKMAEAYSEIGMKGERRRGKGHDGLYQGLSTATKDTYDALHMQALPPR

SEQ ID NO: 2311 - protein, 529 aa, Artificial Sequence
  source: /note="Description of Artificial Sequence: Synthetic Chimeric Antigen Receptor sequence"
MALPVTALLLPLALLLHAARPEVQLVESGGGLVKPGGSLRLSCAASGFTFSGYAMSWVRQAPGKGLEWVSTISSGGTYIYYPDSVKGRFTISRDNAKNSLYLQMNSLRAEDTAVYYCARLGGDNYYEYFDVWGKGTTVTVSSGGGGSGGGGSGGGGSDIVLTQSPASLAVSPGQRATITCRASKSVSTSGYSYMHWYQQKPGQPPKLLIYLASNLESGVPARFSGSGSGTDFTLTINPVEANDTANYYCQHSRELPFTFGGGTKVEIKRTTTTPAPRPPTPAPTIASQPLSLRPEACRPAAGGAVHTRGLDFACDIYIWAPLAGTCGVLLLSLVITLYCRSKRSRLLHSDYMNMTPRRPGPTRKHYQPYAPPRDFAAYRSRRDQRLPPDAHKPPGGGSFRTPIQEEQADAHSTLAKIRVKFSRSADAPAYKQGQNQLYNELNLGRREEYDVLDKRRGRDPEMGGKPRRKNPQEGLYNELQKDKMAEAYSEIGMKGERRRGKGHDGLYQGLSTATKDTYDALHMQALPPR

SEQ ID NO: 2312 - protein, 535 aa, Artificial Sequence
  source: /note="Description of Artificial Sequence: Synthetic Chimeric Antigen Receptor sequence"
MALPVTALLLPLALLLHAARPEVQLQQSGGERATPGASVKMSCKTSGYTFTNYWMHWVKQRPGQGLEWIGYINPSSGYTQYNQKFKDKATLTADKSSSTAYIQLSSLTSEDSAVYYCSTYYGDYLFPYWGQGTLVTVSAGGGGSGGGGSGGGGSDVLMTQTPLSLPVSLGDQASISCRSSQDIVYGNGNTYLEWYLQKPGQSPKLLIYKVSNRFSGVPDRFSGSGSGTDFTLKISRVEAEDLGVYYCFQGSHVPYTFGGGTKLEIKRAAAIEVEQKLISEEDLLDNEKSNGTIIHVKGKHLCPSPLFPGPSKPFWVLVVVGGVLACYSLLVTVAFIIFWVRSKRSRLLHSDYMNMTPRRPGPTRKHYQPYAPPRDFAAYRSKRGRKKLLYIFKQPFMRPVQTTQEEDGCSCRFPEEEEGGCELRVKFSRSADAPAYQQGQNQLYNELNLGRREEYDVLDKRRGRDPEMGGKPRRKNPQEGLYNELQKDKMAEAYSEIGMKGERRRGKGHDGLYQGLSTATKDTYDALHMQALPPR

SEQ ID NO: 2313 - protein, 555 aa, Artificial Sequence
  source: /note="Description of Artificial Sequence: Synthetic Chimeric Antigen Receptor sequence"
MALPVTALLLPLALLLHAARPEVQLQQSGGERATPGASVKMSCKTSGYTFTNYWMHWVKQRPGQGLEWIGYINPSSGYTQYNQKFKDKATLTADKSSSTAYIQLSSLTSEDSAVYYCSTYYGDYLFPYWGQGTLVTVSAGGGGSGGGGSGGGGSDVLMTQTPLSLPVSLGDQASISCRSSQDIVYGNGNTYLEWYLQKPGQSPKLLIYKVSNRFSGVPDRFSGSGSGTDFTLKISRVEAEDLGVYYCFQGSHVPYTFGGGTKLEIKRAAAIEVEQKLISEEDLLDNEKSNGTIIHVKGKHLCPSPLFPGPSKPFWVLVVVGGVLACYSLLVTVAFIIFWVRSKRSRLLHSDYMNMTPRRPGPTRKHYQPYAPPRDFAAYRSRDQRLPPDAHKPPGECLMALPHCSWRVRPTHQSLLFSSPGGGSFRTPIQEEQADAHSTLAKIRVKFSRSADAPAYQQGQNQLYNELNLGRREEYDVLDKRRGRDPEMGGKPRRKNPQEGLYNELQKDKMAEAYSEIGMKGERRRGKGHDGLYQGLSTATKDTYDALHMQALPPR

SEQ ID NO: 2314 - protein, 1397 aa, Artificial Sequence
  source: /note="Description of Artificial Sequence: Synthetic Chimeric Antigen Receptor sequence"
MEEISAAAVKVVPGPERPSPFSQLVYTSNDSYIVHSGDLRKIHKAASRGQVRKLEKMTKRKKTINLNIQDAQKRTALHWACVNGHEEVVTFLVDRKCQLDVLDGEHRTPLMKALQCHQEACANILIDSGADINLVDVYGNTALHYAVYSEILSVVAKLLSHGAVIEVHNKASLTPLLLSITKRSEQIVEFLLIKNANANAVNKYKCTALMLAVCHGSSEIVGMLLQQNVDVFAADICGVTAEHYAVTCGFHHIHEQIMEYIRKLSKNHQNTNPEGTSAGTPDEAAPLAERTPDTAESLVEKTPDEAAPLVERTPDTAESLVEKTPDEAASLVEGTSDKIQCLEKATSGKFEQSAEETPREITSPAKETSEKFTWPAKGRPRKIAWEKKEDTPREIMSPAKETSEKFTWAAKGRPRKIAWEKKETPVKTGCVARVTSNKTKVLEKGRSKMIACPTKESSTKASANDQRFPSESKQEEDEEYSCDSRSLFESSAKIQVCIPESIYQKVMEINREVEEPPKKPSAFKPAIEMQNSVPNKAFELKNEQTLRADPMFPPESKQKDYEENSWDSESLCETVSQKDVCLPKATHQKEIDKINGKLEESPNKDGLLKATCGMKVSIPTKALELKDMQTFKAEPPGKPSAFEPATEMQKSVPNKALELKNEQTLRADEILPSESKQKDYEENSWDTESLCETVSQKDVCLPKAAHQKEIDKINGKLEGSPVKDGLLKANCGMKVSIPTKALELMDMQTFKAEPPEKPSAFEPAIEMQKSVPNKALELKNEQTLRADEILPSESKQKDYEESSWDSESLCETVSQKDVCLPKATHQKEIDKINGKLEESPDNDGFLKAPCRMKVSIPTKALELMDMQTFKAEPPEKPSAFEPAIEMQKSVPNKALELKNEQTLRADQMFPSESKQKKVEENSWDSESLRETVSQKDVCVPKATHQKEMDKISGKLEDSTSLSKILDTVHSCERARELQKDHCEQRTGKMEQMKKKFCVLKKKLSEAKEIKSQLENQKVKWEQELCSVRLTLNQEEEKRRNADILNEKIREELGRIEEQHRKELEVKQQLEQALRIQDIELKSVESNLNQVSHTHENENYLLHENCMLKKEIAMLKLEIATLKHQYQEKENKYFEDIKILKEKNAELQMTLKLKEESLTKRASQYSGQLKVLIAENTMLTSKLKEKQDKEILEAEIESHHPRLASAVQDHDQIVTSRKSQEPAFHIAGDACLQRKMNVDVSSTIYNNEVLHQPLSEAQRKSKSLKINLNYAGDALRENTLVSEHAQRDQRETQCQMKEAEHMYQNEQDNVNKHTEQQESLDQKLFQLQSKNMWLQQQLVHAHKKADNKSKITIDIHFLERKMQHHLLKEKNEEIFNYNNHLKNRIYQYEKEKAETENS

SEQ ID NO: 2315 - protein, 463 aa, Artificial Sequence
  source: /note="Description of Artificial Sequence: Synthetic Chimeric Antigen Receptor sequence"
VQLQESGPDLVKPSQSLSLTCTVTGYSITSGYSWHWIRQFPGNKLEWMGYIHYSGDTDYNPSLKSRFSITRDTSKNQFFLQLNSVTTEDTATYYCATPGGFVYWGQGTLVTVSAGGGGSGGGGSGGGGSDVVMTQTPLTLSVTIGQPASISCKSSQSLLDSDGKTYLHWLLQRPGQSPKRLIFLVSKLDSGVPDRFTGSGSGTDFTLKISRVEAEDLGVYYCWQGTHFPQTFGGGTKLEIKAAAIEVMYPPPYLDNEKSNGTIIHVKGKHLCPSPLFPGPSKPFWVLVVVGGVLACYSLLVTVAFIIFWVRSKRSRLLHSDYMNMTPRRPGPTRKHYQPYAPPRDFAAYRSRVKFSRSADAPAYQQGQNQLYNELNLGRREEYDVLDKRRGRDPEMGGKPRRKNPQEGLYNELQKDKMAEAYSEIGMKGERRRGKGHDGLYQGLSTATKDTYDALHMQALPPR

SEQ ID NO: 2316 - protein, 394 aa, Artificial Sequence
  source: /note="Description of Artificial Sequence: Synthetic Chimeric Antigen Receptor sequence"
MALPVTALLLPLALLLHAARPPGWFLDSPDRPWNPPTFSPALLVVTEGDNATFTCSFSNTSESFVLNWYRMSPSNQTDKLAAFPEDRSQPGQDCRFRVTQLPNGRDFHMSVVRARRNDSGTYLCGAISLAPKAQIKESLRAELRVTERRAEVPTAHPSPSPRPAGQFQTLVTTTPAPRPPTPAPTIASQPLSLRPEACRPAAGGAVHTRGLDFACDIYIWAPLAGTCGVLLLSLVITLYCKRGRKKLLYIFKQPFMRPVQTTQEEDGCSCRFPEEEEGGCELRVKFSRSADAPAYKQGQNQLYNELNLGRREEYDVLDKRRGRDPEMGGKPRRKNPQEGLYNELQKDKMAEAYSEIGMKGERRRGKGHDGLYQGLSTATKDTYDALHMQALPPR

SEQ ID NO: 2317 - protein, 453 aa, Artificial Sequence
  source: /note="Description of Artificial Sequence: Synthetic Chimeric Antigen Receptor sequence"
MALPVTALLLPLALLLHAARPEVQLLESGGGLVQPGGSLRLSCAASGFTFSSYAMNWVRQAPGKGLEWVSAISDSGGSTYYADSVKGRFTISRDNSKNTLYLQMNSLRAEDTAVYYCARYWPMDIWGQGTLVTVSSGGGGSGGGGSGGGGSEIVLTQSPGTLSLSPGERATLSCRASQSVSSSYLAWYQQKPGQAPRLLMYDASIRATGIPDRFSGSGSGTDFTLTISRLEPEDFAVYYCQQYGSWPLTFGQGTKVEIKGLAVSTISSFFPPGYQIYIWAPLAGTCGVLLLSLVITLYCKRGRKKLLYIFKQPFMRPVQTTQEEDGCSCRFPEEEEGGCELRVKFSRSADAPAYQQGQNQLYNELNLGRREEYDVLDKRRGRDPEMGGKPRRKNPQEGLYNELQKDKMAEAYSEIGMKGERRRGKGHDGLYQGLSTATKDTYDALHMQALPPR

SEQ ID NO: 2318 - protein, 486 aa, Artificial Sequence
  source: /note="Description of Artificial Sequence: Synthetic Chimeric Antigen Receptor sequence"
VQLQESGPDLVKPSQSLSLTCTVTGYSITSGYSWHWIRQFPGNKLEWMGYIHYSGDTDYNPSLKSRFSITRDTSKNQFFLQLNSVTTEDTATYYCATPGGFVYWGQGTLVTVSAGGGGSGGGGSGGGGSDVVMTQTPLTLSVTIGQPASISCKSSQSLLDSDGKTYLHWLLQRPGQSPKRLIFLVSKLDSGVPDRFTGSGSGTDFTLKISRVEAEDLGVYYCWQGTHFPQTFGGGTKLEIKAAAFVPVFLPAKPTTTPAPRPPTPAPTIASQPLSLRPEACRPAAGGAVHTRGLDFACDIYIWAPLAGTCGVLLLSLVITLYCNHRNRFSVVKRGRKKLLYIFKQPFMRPVQTTQEEDGCSCRFPEEEEGGCELRVKFSRSADAPAYQQGQNQLYNELNLGRREEYDVLDKRRGRDPEMGGKPRRKNPQEGLYNELQKDKMAEAYSEIGMKGERRRGKGHDGLYQGLSTATKDTYDALHMQALPPR

SEQ ID NO: 2319 - protein, 489 aa, Artificial Sequence
  source: /note="Description of Artificial Sequence: Synthetic Chimeric Antigen Receptor sequence"
MALPVTALLLPLALLLHAARPAIRMTQSPSSLSASVGDRVTITCQASQDISNYLNWYQQKPGKAPKLLIYDASNLETGVPSRFSGSGSGTDFTFTISSLQPEDIATYYCQQYDNLPLTFGGGTKVEIKRGGGGSGGGGSGGGGSEVQLVESGGGLVKPGGSLRLSCAASGFTFSDYYMSWIRQAPGKGLEWVSYISDSTNTIYYADSVKGRFTVSRDNPKNSLYLQMISLRAEDTAVYYCARAVGAGEGFDHWGQGTLVTVSSAAATTTPAPRPPTPAPTIASQPLSLRPEACRPAAGGAVHTRGLDFACDIYIWAPLAGTCGVLLLSLVITLYCKRGRKKLLYIFKQPFMRPVQTTQEEDGCSCRFPEEEEGGCELRVKFSRSADAPAYQQGQNQLYNELNLGRREEYDVLDKRRGRDPEMGGKPRRKNPQEGLYNELQKDKMAEAYSEIGMKGERRRGKGHDGLYQGLSTATKDTYDALHMQALPPR

SEQ ID NO: 2320 - protein, 527 aa, Artificial Sequence
  source: /note="Description of Artificial Sequence: Synthetic Chimeric Antigen Receptor sequence"
VQLQESGPDLVKPSQSLSLTCTVTGYSITSGYSWHWIRQFPGNKLEWMGYIHYSGDTDYNPSLKSRFSITRDTSKNQFFLQLNSVTTEDTATYYCATPGGFVYWGQGTLVTVSAGGGGSGGGGSGGGGSDVVMTQTPLTLSVTIGQPASISCKSSQSLLDSDGKTYLHWLLQRPGQSPKRLIFLVSKLDSGVPDRFTGSGSGTDFTLKISRVEAEDLGVYYCWQGTHFPQTFGGGTKLEIKAAAFVPVFLPAKPTTTPAPRPPTPAPTIASQPLSLRPEACRPAAGGAVHTRGLDFACDIYIWAPLAGTCGVLLLSLVITLYCNHRNRSKRSRLLHSDYMNMTPRRPGPTRKHYQPYAPPRDFAAYRSRFSVVKRGRKKLLYIFKQPFMRPVQTTQEEDGCSCRFPEEEEGGCELRVKFSRSADAPAYQQGQNQLYNELNLGRREEYDVLDKRRGRDPEMGGKPRRKNPQEGLYNELQKDKMAEAYSEIGMKGERRRGKGHDGLYQGLSTATKDTYDALHMQALPPR

SEQ ID NO: 2321 - protein, 453 aa, Artificial Sequence
  source: /note="Description of Artificial Sequence: Synthetic Chimeric Antigen Receptor sequence"
MALPVTALLLPLALLLHAARPEVQLLESGGGLVQPGGSLRLSCAASGFTFSSYAMNWVRQAPGKGLEWVSAILSSGGSTYYADSVKGRFTISRDNSKNTLYLQMNSLRAEDTAVYYCARYWPMDIWGQGTLVTVSSGGGGSGGGGSGGGGSEIVLTQSPGTLSLSPGERATLSCRGGQSVSSSYLAWYQQKPGQAPRLLMYDASIRATGIPDRFSGSGSGTDFTLTISRLEPEDFAVYYCQQYQSWPLTFGQGTKVEIKGLAVSTISSFFPPGYQIYIWAPLAGTCGVLLLSLVITLYCKRGRKKLLYIFKQPFMRPVQTTQEEDGCSCRFPEEEEGGCELRVKFSRSADAPAYQQGQNQLYNELNLGRREEYDVLDKRRGRDPEMGGKPRRKNPQEGLYNELQKDKMAEAYSEIGMKGERRRGKGHDGLYQGLSTATKDTYDALHMQALPPR

SEQ ID NO: 2322 - protein, 482 aa, Artificial Sequence
  source: /note="Description of Artificial Sequence: Synthetic Chimeric Antigen Receptor sequence"
MALPVTALLLPLALLLHAARPEVQLLESGGGLVQPGGSLRLSCAASGFTFSSYAMNWVRQAPGKGLEWVSAISDSGGSTYYADSVKGRFTISRDNSKNTLYLQMNSLRAEDTAVYYCARYWPMDIWGQGTLVTVSSGGGGSGGGGSGGGGSEIVLTQSPGTLSLSPGERATLSCRASQSVSSSYLAWYQQKPGQAPRLLMYDASIRATGIPDRFSGSGSGTDFTLTISRLEPEDFAVYYCQQYGSWPLTFGQGTKVEIKTTTPAPRPPTPAPTIASQPLSLRPEACRPAAGGAVHTRGLDFACDIYIWAPLAGTCGVLLLSLVITLYCKRGRKKLLYIFKQPFMRPVQTTQEEDGCSCRFPEEEEGGCELRVKFSRSADAPAYQQGQNQLYNELNLGRREEYDVLDKRRGRDPEMGGKPRRKNPQEGLYNELQKDKMAEAYSEIGMKGERRRGKGHDGLYQGLSTATKDTYDALHMQALPPR

SEQ ID NO: 2323 - protein, 668 aa, Artificial Sequence
  source: /note="Description of Artificial Sequence: Synthetic Chimeric Antigen Receptor sequence"
MALPVTALLLPLALLLHAARPEVQLLESGGGLVQPGGSLRLSCAASGFTFSSYAMNWVRQAPGKGLEWVSAISDSGGSTYYADSVKGRFTISRDNSKNTLYLQMNSLRAEDTAVYYCARYWPMDIWGQGTLVTVSSGGGGSGGGGSGGGGSEIVLTQSPGTLSLSPGERATLSCRASQSVSSSYLAWYQQKPGQAPRLLMYDASIRATGIPDRFSGSGSGTDFTLTISRLEPEDFAVYYCQQYGSWPLTFGQGTKVEIKEPKSPDKTHTCPPCPAPPVAGPSVFLFPPKPKDTLMIARTPEVTCVVVDVSHEDPEVKFNWYVDGVEVHNAKTKPREEQYNSTYRVVSVLTVLHQDWLNGKEYKCKVSNKALPAPIEKTISKAKGQPREPQVYTLPPSRDELTKNQVSLTCLVKGFYPSDIAVEWESNGQPENNYKTTPPVLDSDGSFFLYSKLTVDKSRWQQGNVFSCSVMHEALHNHYTQKSLSLSPGKIYIWAPLAGTCGVLLLSLVITLYCKRGRKKLLYIFKQPFMRPVQTTQEEDGCSCRFPEEEEGGCELRVKFSRSADAPAYQQGQNQLYNELNLGRREEYDVLDKRRGRDPEMGGKPRRKNPQEGLYNELQKDKMAEAYSEIGMKGERRRGKGHDGLYQGLSTATKDTYDALHMQALPPR

SEQ ID NO: 2324 - protein, 453 aa, Artificial Sequence
  source: /note="Description of Artificial Sequence: Synthetic Chimeric Antigen Receptor sequence"
MALPVTALLLPLALLLHAARPEVQLLESGGGLVQPGGSLRLSCAASGFTFSSYAMNWVRQAPGKGLEWVSAISDFGGSTYYADSVKGRFTISRDNSKNTLYLQMNSLRAEDTAVYYCARYWPMDIWGQGTLVTVSSGGGGSGGGGSGGGGSEIVLTQSPGTLSLSPGERATLSCRASQSVSDIYLAWYQQKPGQAPRLLMYDASIRATGIPDRFSGSGSGTDFTLTISRLEPEDFAVYYCQQYQTWPLTFGQGTKVEIKGLAVSTISSFFPPGYQIYIWAPLAGTCGVLLLSLVITLYCKRGRKKLLYIFKQPFMRPVQTTQEEDGCSCRFPEEEEGGCELRVKFSRSADAPAYQQGQNQLYNELNLGRREEYDVLDKRRGRDPEMGGKPRRKNPQEGLYNELQKDKMAEAYSEIGMKGERRRGKGHDGLYQGLSTATKDTYDALHMQALPPR

SEQ ID NO: 2325 - protein, 482 aa, Artificial Sequence
  source: /note="Description of Artificial Sequence: Synthetic Chimeric Antigen Receptor sequence"
MALPVTALLLPLALLLHAARPEVQLLESGGGLVQPGGSLRLSCAASGFTFSSYAMNWVRQAPGKGLEWVSAILSSGGSTYYADSVKGRFTISRDNSKNTLYLQMNSLRAEDTAVYYCARYWPMDIWGQGTLVTVSSGGGGSGGGGSGGGGSEIVLTQSPGTLSLSPGERATLSCRGGQSVSSSYLAWYQQKPGQAPRLLMYDASIRATGIPDRFSGSGSGTDFTLTISRLEPEDFAVYYCQQYQSWPLTFGQGTKVEIKTTTPAPRPPTPAPTIASQPLSLRPEACRPAAGGAVHTRGLDFACDIYIWAPLAGTCGVLLLSLVITLYCKRGRKKLLYIFKQPFMRPVQTTQEEDGCSCRFPEEEEGGCELRVKFSRSADAPAYQQGQNQLYNELNLGRREEYDVLDKRRGRDPEMGGKPRRKNPQEGLYNELQKDKMAEAYSEIGMKGERRRGKGHDGLYQGLSTATKDTYDALHMQALPPR

SEQ ID NO: 2326 - protein, 519 aa, Artificial Sequence
  source: /note="Description of Artificial Sequence: Synthetic Chimeric Antigen Receptor sequence"
MALPVTALLLPLALLLHAARPEVQLLESGGGLVQPGGSLRLSCAASGFTFSSYAMNWVRQAPGKGLEWVSAILSSGGSTYYADSVKGRFTISRDNSKNTLYLQMNSLRAEDTAVYYCARYWPMDIWGQGTLVTVSSGGGGSGGGGSGGGGSEIVLTQSPGTLSLSPGERATLSCRGGQSVSSSYLAWYQQKPGQAPRLLMYDASIRATGIPDRFSGSGSGTDFTLTISRLEPEDFAVYYCQQYQSWPLTFGQGTKVEIKGSGGGGSCPYSNPSLCSGGGGSCPYSNPSLCSGGGGSTTTPAPRPPTPAPTIASQPLSLRPEACRPAAGGAVHTRGLDFACDIYIWAPLAGTCGVLLLSLVITLYCKRGRKKLLYIFKQPFMRPVQTTQEEDGCSCRFPEEEEGGCELRVKFSRSADAPAYQQGQNQLYNELNLGRREEYDVLDKRRGRDPEMGGKPRRKNPQEGLYNELQKDKMAEAYSEIGMKGERRRGKGHDGLYQGLSTATKDTYDALHMQALPPR

SEQ ID NO: 2327 - protein, 668 aa, Artificial Sequence
  source: /note="Description of Artificial Sequence: Synthetic Chimeric Antigen Receptor sequence"
MALPVTALLLPLALLLHAARPEVQLLESGGGLVQPGGSLRLSCAASGFTFSSYAMNWVRQAPGKGLEWVSAILSSGGSTYYADSVKGRFTISRDNSKNTLYLQMNSLRAEDTAVYYCARYWPMDIWGQGTLVTVSSGGGGSGGGGSGGGGSEIVLTQSPGTLSLSPGERATLSCRGGQSVSSSYLAWYQQKPGQAPRLLMYDASIRATGIPDRFSGSGSGTDFTLTISRLEPEDFAVYYCQQYQSWPLTFGQGTKVEIKEPKSPDKTHTCPPCPAPPVAGPSVFLFPPKPKDTLMIARTPEVTCVVVDVSHEDPEVKFNWYVDGVEVHNAKTKPREEQYNSTYRVVSVLTVLHQDWLNGKEYKCKVSNKALPAPIEKTISKAKGQPREPQVYTLPPSRDELTKNQVSLTCLVKGFYPSDIAVEWESNGQPENNYKTTPPVLDSDGSFFLYSKLTVDKSRWQQGNVFSCSVMHEALHNHYTQKSLSLSPGKIYIWAPLAGTCGVLLLSLVITLYCKRGRKKLLYIFKQPFMRPVQTTQEEDGCSCRFPEEEEGGCELRVKFSRSADAPAYQQGQNQLYNELNLGRREEYDVLDKRRGRDPEMGGKPRRKNPQEGLYNELQKDKMAEAYSEIGMKGERRRGKGHDGLYQGLSTATKDTYDALHMQALPPR

SEQ ID NO: 2328 - protein, 453 aa, Artificial Sequence
  source: /note="Description of Artificial Sequence: Synthetic Chimeric Antigen Receptor sequence"
MALPVTALLLPLALLLHAARPEVQLLESGGGLVQPGGSLRLSCAASGFTFGSYAMTWVRQAPGKGLEWVSAISGSGGNTFYADSVKGRFTISRDNSKNTLYLQMNSLRAEDTAVYYCARVSPIAAPMDYWGQGTLVTVSSGGGGSGGGGSGGGGSEIVLTQSPGTLSLSPGERATLSCRASQLGSFYLAWYQQKPGQAPRLLIYGASSRATGIPDRFSGSGSGTDFTLTISRLEPEDFAVYYCQHYNYPPSFTFGQGTKVEIKGLAVSTISSFFPPGYQIYIWAPLAGTCGVLLLSLVITLYCKRGRKKLLYIFKQPFMRPVQTTQEEDGCSCRFPEEEEGGCELRVKFSRSADAPAYQQGQNQLYNELNLGRREEYDVLDKRRGRDPEMGGKPRRKNPQEGLYNELQKDKMAEAYSEIGMKGERRRGKGHDGLYQGLSTATKDTYDALHMQA

SEQ ID NO: 2329 - protein, 482 aa, Artificial Sequence
  source: /note="Description of Artificial Sequence: Synthetic Chimeric Antigen Receptor sequence"
MALPVTALLLPLALLLHAARPEVQLLESGGGLVQPGGSLRLSCAASGFTFSSYAMNWVRQAPGKGLEWVSAISDFGGSTYYADSVKGRFTISRDNSKNTLYLQMNSLRAEDTAVYYCARYWPMDIWGQGTLVTVSSGGGGSGGGGSGGGGSEIVLTQSPGTLSLSPGERATLSCRASQSVSDIYLAWYQQKPGQAPRLLMYDASIRATGIPDRFSGSGSGTDFTLTISRLEPEDFAVYYCQQYQTWPLTFGQGTKVEIKTTTPAPRPPTPAPTIASQPLSLRPEACRPAAGGAVHTRGLDFACDIYIWAPLAGTCGVLLLSLVITLYCKRGRKKLLYIFKQPFMRPVQTTQEEDGCSCRFPEEEEGGCELRVKFSRSADAPAYQQGQNQLYNELNLGRREEYDVLDKRRGRDPEMGGKPRRKNPQEGLYNELQKDKMAEAYSEIGMKGERRRGKGHDGLYQGLSTATKDTYDALHMQALPPR

SEQ ID NO: 2330 - protein, 668 aa, Artificial Sequence
  source: /note="Description of Artificial Sequence: Synthetic Chimeric Antigen Receptor sequence"
MALPVTALLLPLALLLHAARPEVQLLESGGGLVQPGGSLRLSCAASGFTFSSYAMNWVRQAPGKGLEWVSAISDFGGSTYYADSVKGRFTISRDNSKNTLYLQMNSLRAEDTAVYYCARYWPMDIWGQGTLVTVSSGGGGSGGGGSGGGGSEIVLTQSPGTLSLSPGERATLSCRASQSVSDIYLAWYQQKPGQAPRLLMYDASIRATGIPDRFSGSGSGTDFTLTISRLEPEDFAVYYCQQYQTWPLTFGQGTKVEIKEPKSPDKTHTCPPCPAPPVAGPSVFLFPPKPKDTLMIARTPEVTCVVVDVSHEDPEVKFNWYVDGVEVHNAKTKPREEQYNSTYRVVSVLTVLHQDWLNGKEYKCKVSNKALPAPIEKTISKAKGQPREPQVYTLPPSRDELTKNQVSLTCLVKGFYPSDIAVEWESNGQPENNYKTTPPVLDSDGSFFLYSKLTVDKSRWQQGNVFSCSVMHEALHNHYTQKSLSLSPGKIYIWAPLAGTCGVLLLSLVITLYCKRGRKKLLYIFKQPFMRPVQTTQEEDGCSCRFPEEEEGGCELRVKFSRSADAPAYQQGQNQLYNELNLGRREEYDVLDKRRGRDPEMGGKPRRKNPQEGLYNELQKDKMAEAYSEIGMKGERRRGKGHDGLYQGLSTATKDTYDALHMQALPPR

SEQ ID NO: 2331 - protein, 453 aa, Artificial Sequence
  source: /note="Description of Artificial Sequence: Synthetic Chimeric Antigen Receptor sequence"
MALPVTALLLPLALLLHAARPEVQLLESGGGLVQPGGSLRLSCAASGFTFGSYAMTWVRQAPGKGLEWVSAIDYSGGNTFYADSVKGRFTISRDNSKNTLYLQMNSLRAEDTAVYYCARVSPIASGMDYWGQGTLVTVSSGGGGSGGGGSGGGGSEIVLTQSPGTLSLSPGERATLSCRASQSVSSSYPSWYQQKPGQAPRLLIYGASSRATGIPDRFSGSGSGTDFTLTISRLEPEDFAVYYCQHYPYPPSFTFGQGTKVEIKGLAVSTISSFFPPGYQIYIWAPLAGTCGVLLLSLVITLYCKRGRKKLLYIFKQPFMRPVQTTQEEDGCSCRFPEEEEGGCELRVKFSRSADAPAYQQGQNQLYNELNLGRREEYDVLDKRRGRDPEMGGKPRRKNPQEGLYNELQKDKMAEAYSEIGMKGERRRGKGHDGLYQGLSTATKDTYDALHMQ

SEQ ID NO: 2332 - protein, 486 aa, Artificial Sequence
  source: /note="Description of Artificial Sequence: Synthetic Chimeric Antigen Receptor sequence"
MALPVTALLLPLALLLHAARPEVQLLESGGGLVQPGGSLRLSCAASGFTFGSYAMTWVRQAPGKGLEWVSAISGSGGNTFYADSVKGRFTISRDNSKNTLYLQMNSLRAEDTAVYYCARVSPIAAPMDYWGQGTLVTVSSGGGGSGGGGSGGGGSEIVLTQSPGTLSLSPGERATLSCRASQLGSFYLAWYQQKPGQAPRLLIYGASSRATGIPDRFSGSGSGTDFTLTISRLEPEDFAVYYCQHYNYPPSFTFGQGTKVEIKTTTPAPRPPTPAPTIASQPLSLRPEACRPAAGGAVHTRGLDFACDIYIWAPLAGTCGVLLLSLVITLYCKRGRKKLLYIFKQPFMRPVQTTQEEDGCSCRFPEEEEGGCELRVKFSRSADAPAYQQGQNQLYNELNLGRREEYDVLDKRRGRDPEMGGKPRRKNPQEGLYNELQKDKMAEAYSEIGMKGERRRGKGHDGLYQGLSTATKDTYDALHMQALPPR

SEQ ID NO: 2333 - protein, 672 aa, Artificial Sequence
  source: /note="Description of Artificial Sequence: Synthetic Chimeric Antigen Receptor sequence"
MALPVTALLLPLALLLHAARPEVQLLESGGGLVQPGGSLRLSCAASGFTFGSYAMTWVRQAPGKGLEWVSAISGSGGNTFYADSVKGRFTISRDNSKNTLYLQMNSLRAEDTAVYYCARVSPIAAPMDYWGQGTLVTVSSGGGGSGGGGSGGGGSEIVLTQSPGTLSLSPGERATLSCRASQLGSFYLAWYQQKPGQAPRLLIYGASSRATGIPDRFSGSGSGTDFTLTISRLEPEDFAVYYCQHYNYPPSFTFGQGTKVEIKEPKSPDKTHTCPPCPAPPVAGPSVFLFPPKPKDTLMIARTPEVTCVVVDVSHEDPEVKFNWYVDGVEVHNAKTKPREEQYNSTYRVVSVLTVLHQDWLNGKEYKCKVSNKALPAPIEKTISKAKGQPREPQVYTLPPSRDELTKNQVSLTCLVKGFYPSDIAVEWESNGQPENNYKTTPPVLDSDGSFFLYSKLTVDKSRWQQGNVFSCSVMHEALHNHYTQKSLSLSPGKIYIWAPLAGTCGVLLLSLVITLYCKRGRKKLLYIFKQPFMRPVQTTQEEDGCSCRFPEEEEGGCELRVKFSRSADAPAYQQGQNQLYNELNLGRREEYDVLDKRRGRDPEMGGKPRRKNPQEGLYNELQKDKMAEAYSEIGMKGERRRGKGHDGLYQGLSTATKDTYDALHMQALPPR

SEQ ID NO: 2334 - protein, 453 aa, Artificial Sequence
  source: /note="Description of Artificial Sequence: Synthetic Chimeric Antigen Receptor sequence"
MALPVTALLLPLALLLHAARPEVQLLESGGGLVQPGGSLRLSCAASGFTFSSYPMSWVRQAPGKGLEWVSAIGGSGGSTYYADSVKGRFTISRDNSKNTLYLQMNSLRAEDTAVYYCARYWPMDSWGQGTLVTVSSGGGGSGGGGSGGGGSEIVLTQSPGTLSLSPGERATLSCRASQSVSSTYLAWYQQKPGQAPRLLIYDASSRAPGIPDRFSGSGSGTDFTLTISRLEPEDFAVYYCQQYSTSPLTFGQGTKVEIKGLAVSTISSFFPPGYQIYIWAPLAGTCGVLLLSLVITLYCKRGRKKLLYIFKQPFMRPVQTTQEEDGCSCRFPEEEEGGCELRVKFSRSADAPAYQQGQNQLYNELNLGRREEYDVLDKRRGRDPEMGGKPRRKNPQEGLYNELQKDKMAEAYSEIGMKGERRRGKGHDGLYQGLSTATKDTYDALHMQALPPR

SEQ ID NO: 2335 - protein, 487 aa, Artificial Sequence
  source: /note="Description of Artificial Sequence: Synthetic Chimeric Antigen Receptor sequence"
MALPVTALLLPLALLLHAARPEVQLLESGGGLVQPGGSLRLSCAASGFTFGSYAMTWVRQAPGKGLEWVSAIDYSGGNTFYADSVKGRFTISRDNSKNTLYLQMNSLRAEDTAVYYCARVSPIASGMDYWGQGTLVTVSSGGGGSGGGGSGGGGSEIVLTQSPGTLSLSPGERATLSCRASQSVSSSYPSWYQQKPGQAPRLLIYGASSRATGIPDRFSGSGSGTDFTLTISRLEPEDFAVYYCQHYPYPPSFTFGQGTKVEIKTTTPAPRPPTPAPTIASQPLSLRPEACRPAAGGAVHTRGLDFACDIYIWAPLAGTCGVLLLSLVITLYCKRGRKKLLYIFKQPFMRPVQTTQEEDGCSCRFPEEEEGGCELRVKFSRSADAPAYQQGQNQLYNELNLGRREEYDVLDKRRGRDPEMGGKPRRKNPQEGLYNELQKDKMAEAYSEIGMKGERRRGKGHDGLYQGLSTATKDTYDALHMQALPPR

SEQ ID NO: 2336 - protein, 673 aa, Artificial Sequence
  source: /note="Description of Artificial Sequence: Synthetic Chimeric Antigen Receptor sequence"
MALPVTALLLPLALLLHAARPEVQLLESGGGLVQPGGSLRLSCAASGFTFGSYAMTWVRQAPGKGLEWVSAIDYSGGNTFYADSVKGRFTISRDNSKNTLYLQMNSLRAEDTAVYYCARVSPIASGMDYWGQGTLVTVSSGGGGSGGGGSGGGGSEIVLTQSPGTLSLSPGERATLSCRASQSVSSSYPSWYQQKPGQAPRLLIYGASSRATGIPDRFSGSGSGTDFTLTISRLEPEDFAVYYCQHYPYPPSFTFGQGTKVEIKEPKSPDKTHTCPPCPAPPVAGPSVFLFPPKPKDTLMIARTPEVTCVVVDVSHEDPEVKFNWYVDGVEVHNAKTKPREEQYNSTYRVVSVLTVLHQDWLNGKEYKCKVSNKALPAPIEKTISKAKGQPREPQVYTLPPSRDELTKNQVSLTCLVKGFYPSDIAVEWESNGQPENNYKTTPPVLDSDGSFFLYSKLTVDKSRWQQGNVFSCSVMHEALHNHYTQKSLSLSPGKIYIWAPLAGTCGVLLLSLVITLYCKRGRKKLLYIFKQPFMRPVQTTQEEDGCSCRFPEEEEGGCELRVKFSRSADAPAYQQGQNQLYNELNLGRREEYDVLDKRRGRDPEMGGKPRRKNPQEGLYNELQKDKMAEAYSEIGMKGERRRGKGHDGLYQGLSTATKDTYDALHMQALPPR

SEQ ID NO: 2337 - protein, 453 aa, Artificial Sequence
  source: /note="Description of Artificial Sequence: Synthetic Chimeric Antigen Receptor sequence"
MALPVTALLLPLALLLHAARPEVQLLESGGGLVQPGGSLRLSCAASGFTFSSYPMSWVRQAPGKGLEWVSAIGGSGGWSYYADSVKGRFTISRDNSKNTLYLQMNSLRAEDTAVYYCARYWPMDSWGQGTLVTVSSGGGGSGGGGSGGGGSEIVLTQSPGTLSLSPGERATLSCWLSQSVSSTYLAWYQQKPGQAPRLLIYDASSRAPGIPDRFSGSGSGTDFTLTISRLEPEDFAVYYCQQYSEWPLTFGQGTKVEIKGLAVSTISSFFPPGYQIYIWAPLAGTCGVLLLSLVITLYCKRGRKKLLYIFKQPFMRPVQTTQEEDGCSCRFPEEEEGGCELRVKFSRSADAPAYQQGQNQLYNELNLGRREEYDVLDKRRGRDPEMGGKPRRKNPQEGLYNELQKDKMAEAYSEIGMKGERRRGKGHDGLYQGLSTATKDTYDALHMQALPPR

SEQ ID NO: 2338 - protein, 482 aa, Artificial Sequence
  source: /note="Description of Artificial Sequence: Synthetic Chimeric Antigen Receptor sequence"
MALPVTALLLPLALLLHAARPEVQLLESGGGLVQPGGSLRLSCAASGFTFSSYPMSWVRQAPGKGLEWVSAIGGSGGSTYYADSVKGRFTISRDNSKNTLYLQMNSLRAEDTAVYYCARYWPMDSWGQGTLVTVSSGGGGSGGGGSGGGGSEIVLTQSPGTLSLSPGERATLSCRASQSVSSTYLAWYQQKPGQAPRLLIYDASSRAPGIPDRFSGSGSGTDFTLTISRLEPEDFAVYYCQQYSTSPLTFGQGTKVEIKTTTPAPRPPTPAPTIASQPLSLRPEACRPAAGGAVHTRGLDFACDIYIWAPLAGTCGVLLLSLVITLYCKRGRKKLLYIFKQPFMRPVQTTQEEDGCSCRFPEEEEGGCELRVKFSRSADAPAYQQGQNQLYNELNLGRREEYDVLDKRRGRDPEMGGKPRRKNPQEGLYNELQKDKMAEAYSEIGMKGERRRGKGHDGLYQGLSTATKDTYDALHMQALPPR

SEQ ID NO: 2339 - protein, 668 aa, Artificial Sequence
  source: /note="Description of Artificial Sequence: Synthetic Chimeric Antigen Receptor sequence"
MALPVTALLLPLALLLHAARPEVQLLESGGGLVQPGGSLRLSCAASGFTFSSYPMSWVRQAPGKGLEWVSAIGGSGGSTYYADSVKGRFTISRDNSKNTLYLQMNSLRAEDTAVYYCARYWPMDSWGQGTLVTVSSGGGGSGGGGSGGGGSEIVLTQSPGTLSLSPGERATLSCRASQSVSSTYLAWYQQKPGQAPRLLIYDASSRAPGIPDRFSGSGSGTDFTLTISRLEPEDFAVYYCQQYSTSPRIFGQGTKVEIKEPKSPDKTHTCPPCPAPPVAGPSVFLFPPKPKDTLMIARTPEVTCVVVDVSHEDPEVKFNWYVDGVEVHNAKTKPREEQYNSTYRVVSVLTVLHQDWLNGKEYKCKVSNKALPAPIEKTISKAKGQPREPQVYTLPPSRDELTKNQVSLTCLVKGFYPSDIAVEWESNGQPENNYKTTPPVLDSDGSFFLYSKLTVDKSRWQQGNVFSCSVMHEALHNHYTQKSLSLSPGKIYIWAPLAGTCGVLLLSLVITLYCKRGRKKLLYIFKQPFMRPVQTTQEEDGCSCRFPEEEEGGCELRVKFSRSADAPAYQQGQNQLYNELNLGRREEYDVLDKRRGRDPEMGGKPRRKNPQEGLYNELQKDKMAEAYSEIGMKGERRRGKGHDGLYQGLSTATKDTYDALHMQALPPR

SEQ ID NO: 2340 - protein, 482 aa, Artificial Sequence
  source: /note="Description of Artificial Sequence: Synthetic Chimeric Antigen Receptor sequence"
MALPVTALLLPLALLLHAARPEVQLLESGGGLVQPGGSLRLSCAASGFTFSSYPMSWVRQAPGKGLEWVSAIGGSGGWSYYADSVKGRFTISRDNSKNTLYLQMNSLRAEDTAVYYCARYWPMDSWGQGTLVTVSSGGGGSGGGGSGGGGSEIVLTQSPGTLSLSPGERATLSCWLSQSVSSTYLAWYQQKPGQAPRLLIYDASSRAPGIPDRFSGSGSGTDFTLTISRLEPEDFAVYYCQQYSEWPLTFGQGTKVEIKTTTPAPRPPTPAPTIASQPLSLRPEACRPAAGGAVHTRGLDFACDIYIWAPLAGTCGVLLLSLVITLYCKRGRKKLLYIFKQPFMRPVQTTQEEDGCSCRFPEEEEGGCELRVKFSRSADAPAYQQGQNQLYNELNLGRREEYDVLDKRRGRDPEMGGKPRRKNPQEGLYNELQKDKMAEAYSEIGMKGERRRGKGHDGLYQGLSTATKDTYDALHMQALPPR

SEQ ID NO: 2341 - protein, 668 aa, Artificial Sequence
  source: /note="Description of Artificial Sequence: Synthetic Chimeric Antigen Receptor sequence"
MALPVTALLLPLALLLHAARPEVQLLESGGGLVQPGGSLRLSCAASGFTFSSYPMSWVRQAPGKGLEWVSAIGGSGGWSYYADSVKGRFTISRDNSKNTLYLQMNSLRAEDTAVYYCARYWPMDSWGQGTLVTVSSGGGGSGGGGSGGGGSEIVLTQSPGTLSLSPGERATLSCWLSQSVSSTYLAWYQQKPGQAPRLLIYDASSRAPGIPDRFSGSGSGTDFTLTISRLEPEDFAVYYCQQYSEWPLTFGQGTKVEIKEPKSPDKTHTCPPCPAPPVAGPSVFLFPPKPKDTLMIARTPEVTCVVVDVSHEDPEVKFNWYVDGVEVHNAKTKPREEQYNSTYRVVSVLTVLHQDWLNGKEYKCKVSNKALPAPIEKTISKAKGQPREPQVYTLPPSRDELTKNQVSLTCLVKGFYPSDIAVEWESNGQPENNYKTTPPVLDSDGSFFLYSKLTVDKSRWQQGNVFSCSVMHEALHNHYTQKSLSLSPGKIYIWAPLAGTCGVLLLSLVITLYCKRGRKKLLYIFKQPFMRPVQTTQEEDGCSCRFPEEEEGGCELRVKFSRSADAPAYQQGQNQLYNELNLGRREEYDVLDKRRGRDPEMGGKPRRKNPQEGLYNELQKDKMAEAYSEIGMKGERRRGKGHDGLYQGLSTATKDTYDALHMQALPPR

SEQ ID NO: 2342 - protein, 373 aa, Artificial Sequence
  source: /note="Description of Artificial Sequence: Synthetic Chimeric Antigen Receptor sequence"
PGWFLDSPDRPWNPPTFSPALLVVTEGDNATFTCSFSNTSESFVLNWYRMSPSNQTDKLAAFPEDRSQPGQDCRFRVTQLPNGRDFHMSVVRARRNDSGTYLCGAISLAPKAQIKESLRAELRVTERRAEVPTAHPSPSPRPAGQFQTLVTTTPAPRPPTPAPTIASQPLSLRPEACRPAAGGAVHTRGLDFACDIYIWAPLAGTCGVLLLSLVITLYCKRGRKKLLYIFKQPFMRPVQTTQEEDGCSCRFPEEEEGGCELRVKFSRSADAPAYKQGQNQLYNELNLGRREEYDVLDKRRGRDPEMGGKPRRKNPQEGLYNELQKDKMAEAYSEIGMKGERRRGKGHDGLYQGLSTATKDTYDALHMQALPPR

SEQ ID NO: 2343 - protein, 354 aa, Artificial Sequence
  source: /note="Description of Artificial Sequence: Synthetic Chimeric Antigen Receptor sequence"
MALPVTALLLPLALLLHAARPPGWFLDSPDRPWNPPTFSPALLVVTEGDNATFTCSFSNTSESFYLNWYRMSPSNQTDKLAAFPEDRSQPGQDCRFRVTQLPNGRDFHMSVYRARRNDSGTYLCGAISLAPKAQIKESLRAELRVTERRAEVPTAHPSPSPRPAGQFQTLVTTTPAPRPPTPAPTIASQPLSLRPEACRPAAGGAVHTRGLDFACDIYIWAPLAGDGCSCRFPEEEEGGCELRVKFSRSADAPAYKQGQNQLYNELNLGRREEYDVLDKRRGRDPEMGGKPRRKNPQEGLYNELQKDKMAEAYSEIGMKGERRRGKGHDGLYQGLSTATKDTYDALHMQALPPR

SEQ ID NO: 2344 - protein, 367 aa, Artificial Sequence
  source: /note="Description of Artificial Sequence: Synthetic Chimeric Antigen Receptor sequence"
MALPVTALLLPLALLLHAARPPGWFLDSPDRPWNPPTFSPALLVVTEGDNATFTCSFSNTSESFVLNWYRMSPSNQTDKLAAFPEDRSQPGQDCRFRVTQLPNGRDFHMSVVRARRNDSGTYLCGAISLAPKAQIKESLRAELRVTERRAEVPTAHPSPSPRPAGQFQTLVTTTPAPRPPTPAPTIASQPLSLRPEACRPAAGGAVHTRGLDFACDIYIWAPLAGTCGVLLLSLVITLYCKRGRKKLLGGGGSGGGGSGVQVETISPGDGRTFPKRGQTCVVHYTGMLEDGKKFDSSRDRNKPFKFMLGKQEVIRGWEEGVAQMSVGQRAKLTISPDYAYGATGHPGIIPPHATLVFDVELLKLETS

SEQ ID NO: 2345 - protein, 372 aa, Artificial Sequence
  source: /note="Description of Artificial Sequence: Synthetic Chimeric Antigen Receptor sequence"
PGWFLDSPDRPWNPPTFSPALLVVTEGDNATFTCSFSNTSESFVLNWYRMSPSNQTDKLAAFPEDRSQPGQDCRFRVTQLPNGRDFHMSVVRARRNDSGTVLCGAISLAPKAQIKESHAELRVTERRAEVPTAHPSPSPRPAGQFQTLVTTTPAPRPPTPAPTIASQPLSLRPEACRPAAGGAVHTRGLDFACDIYIWAPLAGTCGVLLLSLVITLYCKRGRKKLLYIFKQPFMRPVQTTQEEDGCSCRFPEEEEGGCELRVKFSRSADAPAYKQGQNQLYNELNLGRREEYDVLDKRRGRDPEMGGKPRRKNPQEGLYNELQKDKMAEAYSEIGMKGERRRGKGHDGLYQGLSTATKDTYDALHMQALPPR

SEQ ID NO: 2346 - protein, 373 aa, Artificial Sequence; identical to SEQ ID NO: 2342
  source: /note="Description of Artificial Sequence: Synthetic Chimeric Antigen Receptor sequence"

SEQ ID NO: 2347 - protein, 373 aa, Artificial Sequence; identical to SEQ ID NO: 2342
  source: /note="Description of Artificial Sequence: Synthetic Chimeric Antigen Receptor sequence"

SEQ ID NO: 2348 - protein, 373 aa, Artificial Sequence
  source: /note="Description of Artificial Sequence: Synthetic Chimeric Antigen Receptor sequence"
PGWFLDSPDRPWNPPTFSPALLVVTEGDNATFTCSFSNTSESFYLNWYRMSPSNQTDKLAAFPEDRSQPGQDCRFRVTQLPNGRDFHMSVYRARRNDSGTYLCGAISLAPKAQIKESLRAELRVTERRAEVPTAHPSPSPRPAGQFQTLVTTTPAPRPPTPAPTIASQPLSLRPEACRPAAGGAVHTRGLDFACDIYIWAPLAGTCGVLLLSLVITLYCKRGRKKLLYIFKQPFMRPVQTTQEEDGCSCRFPEEEEGGCELRVKFSRSADAPAYKQGQNQLYNELNLGRREEYDVLDKRRGRDPEMGGKPRRKNPQEGLYNELQKDKMAEAYSEIGMKGERRRGKGHDGLYQGLSTATKDTYDALHMQALPPR

SEQ ID NO: 2349 - protein, 386 aa, Artificial Sequence
  source: /note="Description of Artificial Sequence: Synthetic Chimeric Antigen Receptor sequence"
MALPVTALLLPLALLLHAARPGSGSGAQAAEVQLQQSGPELVKPGTSVRISCKTSGYTFTEYTIHWVKQSHGKSLEWIGNINPNNGGTTYNQKFEDKATLTVDKSSSTAYMELRSLTSEDSAVYYCAAGWNFDYWGQGTTVTVSSGGGGSGGGGSGGGGSDIVMTQSHKFMSTSVGDRVSIICKASQDVGTAVDWYQQKPGQSPKLLIYWASTRHTGVPDRFTGSGSGTDFTLTITNVQSEDLADYFCQQYNSYPLTFGAGTMLDLKRAAARSDPASGAGSGSGSAIELLPVPGAKKSAKLYIPYIILTIIILTIVGFIWLLKVNGCRKYKLNKTESTPVVEEDEMQPYASYTEKNNPLYDTTNKVKASEALQSEVDTDLHTLSHG

SEQ ID NO: 2350 - protein, 390 aa, Artificial Sequence
  source: /note="Description of Artificial Sequence: Synthetic Chimeric Antigen Receptor sequence"
MALPVTALLLPLALLLHAARPPGWFLDSPDRPWPPTFSPALLVVTEGDNATFTCSFSNTSESFVLNWYRMSPSNQTDKLAAFPEDRSQPGQDCRFRVTQLPNGRDFHMSVWARRDSGTYLCGAISLAPKAQIKESLRAELRVTERRAEVPTAHPSPSPRPAGQFQTLVTTTPAPRPPTPAPTIASQPLSLRPEACRPAAGGAVHTRGLDFACDRYIWAPLAGTCGVLLLSLVITLYCKRGRKKLLYIFKQPFMRPVQTTQEEDGCSCRFPEEEEGGCELRVKFSRSADAPAYKQGQNQLYNELNLGRREEYDVLDKRRGRDPEMGGKPRRKPQEGLYNELQKDKMAEAYSEIGMKGERRRGKGHDGLYQGLSTATKDTYDALHMQALPPR

SEQ ID NO: 2351 - protein, 394 aa, Artificial Sequence
  source: /note="Description of Artificial Sequence: Synthetic Chimeric Antigen Receptor sequence"
MALPVTALLLPLALLLHAARPPGWFLDSPDRPWNPPTFSPALLVVTEGDNATFTCSFSNTSESFVLNWVRMSPSNQTDKLAAFPEDRSQPGQDCRFRVTQLPNGRDFHMSVVRARRNDSGTVLCGAISLAPKAQIKESLRAELRVTERRAEVPTAHPSPSPRPAGQFQTLVTTTPAPRPPTPAPTIASQPLSLRPEACRPAAGGAVHTRGLDFACDIYIWAPLAGTCGVLLLSLVITLYCKRGRKKLLYIFKQPFMRPVQTTQEEDGCSCRFPEEEEGGCELRVKFSRSADAPAYKQGQNQLYNELNLGRREEYDVLDKRRGRDPEMGGKPRRKNPQEGLYNELQKDKMAEAYSEIGMKGERRRGKGHDGLYQGLSTATKDTYDALHMQALPPR

SEQ ID NO: 2352 - protein, 394 aa, Artificial Sequence
  source: /note="Description of Artificial Sequence: Synthetic Chimeric Antigen Receptor sequence"
MALPVTALLLPLALLLHAARPPGWFLDSPDRPWNPPTFSPALLVVTEGDNATFTCSFSNTSESFVLNWYRMSPSNQTDKLAAFPEDRSQPGQDCRFRVTQLPNGRDFHMSVVRARRNDSGTYLCGAISLAPKAQIKESLRAEIRVTERRAEVPTAHPSPSPRPAGQFQTLVTTTPAPRPPTPAPTIASQPLSLRPEACRPAAGGAVHTRGLDFACDIYIWAPLAGTCGVLIISLVITLYCKRGRKKLLYIFKQPFMRPVQTTQEEDGCSCRFPEEEEGGCELRVKFSRSADAPAYKQGQNQLYNELNLGRREEYDVLDKRRGRDPEMGGKPRRKNPQEGLYNELQKDKMAEAYSEIGMKGERRRGKGHDGLYQGLSTATKDTYDALHMQALPPR

SEQ ID NO: 2353 - protein, 488 aa, Artificial Sequence
  source: /note="Description of Artificial Sequence: Synthetic Chimeric Antigen Receptor sequence"
MALPVTALLLPLALLLHAARPQVQLVQSGGGLVQPGRSLRLSCAASGFTFDDYAMHWVRQAPGKGLEWVSGISWNSGSIGYADSVKGRFTISRDNAKNSLYLQMNSLRAEDTAVYYCAKDGSSSWSWGYFDYWGQGTLVTVSSGGGGSGGGGSGGGGSSSELTQDPAVSVALGQTVRTTCQGDALRSYYASWYQQKPGQAPMLVIYGKNNRPSGIPDRFSGSDSGDTASLTITGAQAEDEADYYCNSRDSSGYPVFGTGTKVTVLTTTPAPRPPTPAPTIASQPLSLRPEACRPAAGGAVHTRGLDFACDIYIWAPLAGTCGVLLLSLVITLYCKRGRKKLLYIFKQPFMRPVQTTQEEDGCSCRFPEEEEGGCELRVKFSRSADAPAYKQGQNQLYNELNLGRREEYDVLDKRRGRDPEMGGKPRRKNPQEGLYNELQKDKMAEAYSEIGMKGERRRGKGHDGLYQGLSTATKDTYDALHMQALPPR

SEQ ID NO: 2354 - DNA, 1182 bp, Artificial Sequence
  source: /note="Description of Artificial Sequence: Synthetic Chimeric Antigen Receptor sequence"
atggccctccctgtcactgccctgcttctccccctcgcactcctgctccacgccgctagaccacccggatggtttctggactctccggatcgcccgtggaatcccccaaccttctcaccggcactcttggttgtgactgagggcgataatgcgaccttcacgtgctcgttctccaacacctccgaatcattcgtgctgaactggtaccgcatgagcccgtcaaaccagaccgacaagctcgccgcgtttccggaagatcggtcgcaaccgggacaggattgtcggttccgcgtgactcaactgccgaatggcagagacttccacatgagcgtggtccgcgctaggcgaaacgactccgggacctacctgtgcggagccatctcgctggcgcctaaggcccaaatcaaagagagcttgagggccgaactgagagtgaccgagcgcagagctgaggtgccaactgcacatccatccccatcgcctcggcctgcggggcagtttcagaccctggtcacgaccactccggcgccgcgcccaccgactccggccccaactatcgcgagccagcccctgtcgctgaggccggaagcatgccgccctgccgccggaggtgctgtgcatacccggggattggacttcgcatgcgacatctacatttgggctcctctcgccggaacttgtggcgtgctccttctgtccctggtcatcaccctgtactgcaagcggggtcggaaaaagcttctgtacattttcaagcagcccttcatgaggcccgtgcaaaccacccaggaggaggacggttgctcctgccggttccccgaagaggaagaaggaggttgcgagctgcgcgtgaagttctcccggagcgccgacgcccccgcctataagcagggccagaaccagctgtacaacgaactgaacctgggacggcgggaagagtacgatgtgctggacaagcggcgcggccgggaccccgaaatgggcgggaagcctagaagaaagaaccctcaggaaggcctgtataacgagctgcagaaggacaagatggccgaggcctactccgaaattgggatgaagggagagcggcggaggggaaaggggcacgacggcctgtaccaaggactgtccaccgccaccaaggacacatacgatgccctgcacatgcaggcccttccccctcgc

SEQ ID NO: 2355 - protein, 488 aa, Artificial Sequence
  source: /note="Description of Artificial Sequence: Synthetic Chimeric Antigen Receptor sequence"
MALPVTALLLPLALLLHAARPQVQLQQSGAEVKKPGASVKVSCKASGYTFTGYYMHWVRQAPGQGLEWMGRINPNSGGTNYAQKFQGRVTMTRDTSISTAYMELSRLRSEDTAVYYCARGRYYGMDVWGQGTMVTVSSGGGGSGGGGSGGGGSGGGGSEIVLTQSPATLSLSPGERATISCRASQSVSSNFAWYQQRPGQAPRLLIYDASNRATGIPPRFSGSGSGTDFTLTISSLEPEDFAAYYCHQRSNWLYTFGQGTKVDIKTTTPAPRPPTPAPTIASQPLSLRPEACRPAAGGAVHTRGLDFACDIYIWAPLAGTCGVLLLSLVITLYCKRGRKKLLYIFKQPFMRPVQTTQEEDGCSCRFPEEEEGGCELRVKFSRSADAPAYKQGQNQLYNELNLGRREEYDVLDKRRGRDPEMGGKPRRKNPQEGLYNELQKDKMAEAYSEIGMKGERRRGKGHDGLYQGLSTATKDTYDALHMQALPPR

SEQ ID NO: 2356 - protein, 499 aa, Artificial Sequence
  source: /note="Description of Artificial Sequence: Synthetic Chimeric Antigen Receptor sequence"
MALPVTALLLPLALLLHAARPQVQLVQSGAEVKKPGASVKVSCKASGYTFTSYGISWVRQAPGQGLEWMGWISAYNGNTNYAQKLQGRVTMTTDTSTSTAYMELRSLRSDDTAVYYCARVAGGIYYYYGMDVWGQGTTITVSSGGGGSGGGGSGGGGSGGGGSDIVMTQTPDSLAVSLGERATISCKSSHSVLYNRNNKNYLAWYQQKPGQPPKLLFYWASTRKSGVPDRFSGSGSGTDFTLTISSLQPEDFATYFCQQTQTFPLTFGQGTRLEINTTTPAPRPPTPAPTIASQPLSLRPEACRPAAGGAVHTRGLDFACDIYIWAPLAGTCGVLLLSLVITLYCKRGRKKLLYIFKQPFMRPVQTTQEEDGCSCRFPEEEEGGCELRVKFSRSADAPAYKQGQNQLYNELNLGRREEYDVLDKRRGRDPEMGGKPRRKNPQEGLYNELQKDKMAEAYSEIGMKGERRRGKGHDGLYQGLSTATKDTYDALHMQALPPR

SEQ ID NO: 2357 - protein, 485 aa, Artificial Sequence
  source: /note="Description of Artificial Sequence: Synthetic Chimeric Antigen Receptor sequence"
MALPVTALLLPLALLLHAARPQVQLQQSGAEVKKPGASVKVSCKASGYTFTGYYMHWVRQAPGQGLEWMGWINPNSGGTNYAQNFQGRVTMTRDTSISTAYMELRRLRSDDTAVYYCASGWDFDYWGQGTLVTVSSGGGGSGGGGSGGGGSGGGGSDIRMTQSPSSLSASVGDRVTITCRASQSIRYYLSWYQQKPGKAPKLLIYTASILQNGVPSRFSGSGSGTDFTLTISSLQPEDFATYYCLQTYTTPDFGPGTKVEIKTTTPAPRPPTPAPTIASQPLSLRPEACRPAAGGAVHTRGLDFACDIYIWAPLAGTCGVLLLSLVITLYCKRGRKKLLYIFKQPFMRPVQTTQEEDGCSCRFPEEEEGGCELRVKFSRSADAPAYKQGQNQLYNELNLGRREEYDVLDKRRGRDPEMGGKPRRKNPQEGLYNELQKDKMAEAYSEIGMKGERRRGKGHDGLYQGLSTATKDTYDALHMQALPPR

SEQ ID NO: 2358 - protein, 490 aa, Artificial Sequence
  source: /note="Description of Artificial Sequence: Synthetic Chimeric Antigen Receptor sequence"
MALPVTALLLPLALLLHAARPQVQLVQSGAEVKKPGASVKVSCKASGYTFTGYYMHWVRQAPGQGLEWMGRINPNSGGTNYAQKFQGRVTMTTDTSTSTAYMELRSLRSDDTAVYYCARTTTSYAFDIWGQGTMVTVSSGGGGSGGGGSGGGGSGGGGSDIQLTQSPSTLSASVGDRVTITCRASQSISTWLAWYQQKPGKAPNLLIYKASTLESGVPSRFSGSGSGTEFTLTISSLQPDDFATYYCQQYNTYSPYTFGQGTKLEIKTTTPAPRPPTPAPTIASQPLSLRPEACRPAAGGAVHTRGLDFACDIYIWAPLAGTCGVLLLSLVITLYCKRGRKKLLYIFKQPFMRPVQTTQEEDGCSCRFPEEEEGGCELRVKFSRSADAPAYKQGQNQLYNELNLGRREEYDVLDKRRGRDPEMGGKPRRKNPQEGLYNELQKDKMAEAYSEIGMKGERRRGKGHDGLYQGLSTATKDTYDALHMQALPPR

SEQ ID NO: 2359 - protein, 493 aa, Artificial Sequence
  source: /note="Description of Artificial Sequence: Synthetic Chimeric Antigen Receptor sequence"
MALPVTALLLPLALLLHAARPQVQLVQSGGGLVKPGGSLRLSCEASGFIFSDYYMGWIRQAPGKGLEWVSYIGRSGSSMYYADSVKGRFTFSRDNAKNSLYLQMNSLRAEDTAVYYCAASPVVAATEDFQHWGQGTLVTVSSGGGGSGGGGSGGGGSGGGGSDIVMTQTPATLSLSPGERATLSCRASQSVTSNYLAWYQQKPGQAPRLLLFGASTRATGIPDRFSGSGSGTDFTLTINRLEPEDFAMYYCQQYGSAPVTFGQGTKLEIKTTTPAPRPPTPAPTIASQPLSLRPEACRPAAGGAVHTRGLDFACDIYIWAPLAGTCGVLLLSLVITLYCKRGRKKLLYIFKQPFMRPVQTTQEEDGCSCRFPEEEEGGCELRVKFSRSADAPAYKQGQNQLYNELNLGRREEYDVLDKRRGRDPEMGGKPRRKNPQEGLYNELQKDKMAEAYSEIGMKGERRRGKGHDGLYQGLSTATKDTYDALHMQALPPR

SEQ ID NO: 2360 - protein, 493 aa, Artificial Sequence
  source: /note="Description of Artificial Sequence: Synthetic Chimeric Antigen Receptor sequence"
MALPVTALLLPLALLLHAARPQVQLVQSGAEVRAPGASVKISCKASGFTFRGYYIHWVRQAPGQGLEWMGIINPSGGSRAYAQKFQGRVTMTRDTSTSTVYMELSSLRSDDTAMYYCARTASCGGDCYYLDYWGQGTLVTVSSGGGGSGGGGSGGGGSGGGGSDIQMTQSPPTLSASVGDRVTITCRASENVNIWLAWYQQKPGKAPKLLIYKSSSLASGVPSRFSGSGSGAEFTLTISSLQPDDFATYYCQQYQSYPLTFGGGTKVDIKTTTPAPRPPTPAPTIASQPLSLRPEACRPAAGGAVHTRGLDFACDIYIWAPLAGTCGVLLLSLVITLYCKRGRKKLLYIFKQPFMRPVQTTQEEDGCSCRFPEEEEGGCELRVKFSRSADAPAYKQGQNQLYNELNLGRREEYDVLDKRRGRDPEMGGKPRRKNPQEGLYNELQKDKMAEAYSEIGMKGERRRGKGHDGLYQGLSTATKDTYDALHMQALPPR

SEQ ID NO: 2361 - protein, 490 aa, Artificial Sequence
  source: /note="Description of Artificial Sequence: Synthetic Chimeric Antigen Receptor sequence"
MALPVTALLLPLALLLHAARPEVQLVESGGGLVQPGRSLRLSCAASGFTFDDYAMHWVRQAPGKGLEWVSGISWNSGSTGYADSVKGRFTISRDNAKNSLYLQMNSLRAEDTALYYCAKDSSSWYGGGSAFDIWGQGTMVTVSSGGGGSGGGGSGGGGSSSELTQEPAVSVALGQTVRITCQGDSLRSYYASWYQQKPGQAPVLVIFGRSRRPSGIPDRFSGSSSGNTASLIITGAQAEDEADYYCNSRDNTANHYVFGTGTKLTVLTTTPAPRPPTPAPTIASQPLSLRPEACRPAAGGAVHTRGLDFACDIYIWAPLAGTCGVLLLSLVITLYCKRGRKKLLYIFKQPFMRPVQTTQEEDGCSCRFPEEEEGGCELRVKFSRSADAPAYKQGQNQLYNELNLGRREEYDVLDKRRGRDPEMGGKPRRKNPQEGLYNELQKDKMAEAYSEIGMKGERRRGKGHDGLYQGLSTATKDTYDALHMQALPPR

SEQ ID NO: 2362 - protein, 490 aa, Artificial Sequence
  source: /note="Description of Artificial Sequence: Synthetic Chimeric Antigen Receptor sequence"
MALPVTALLLPLALLLHAARPEVQLVESGGGLVQPGRSLRLSCAASGFTFDDYAMHWVRQAPGKGLEWVSGISWNSGSTGYADSVKGRFTISRDNAKNSLYLQMNSLRAEDTALYYCAKDSSSWYGGGSAFDIWGQGTMVTVSSGGGGSGGGGSGGGGSSSELTQDPAVSVALGQTVRITCQGDSLRSYYASWYQQKPGQAPVLVIYGKNNRPSGIPDRFSGSSSGNTASLTITGAQAEDEADYYCNSRGSSGNHYVFGTGTKVTVLTTTPAPRPPTPAPTIASQPLSLRPEACRPAAGGAVHTRGLDFACDIYIWAPLAGTCGVLLLSLVITLYCKRGRKKLLYIFKQPFMRPVQTTQEEDGCSCRFPEEEEGGCELRVKFSRSADAPAYKQGQNQLYNELNLGRREEYDVLDKRRGRDPEMGGKPRRKNPQEGLYNELQKDKMAEAYSEIGMKGERRRGKGHDGLYQGLSTATKDTYDALHMQALPPR

SEQ ID NO: 2363 - protein, 495 aa, Artificial Sequence
  source: /note="Description of Artificial Sequence: Synthetic Chimeric Antigen Receptor sequence"
MALPVTALLLPLALLLHAARPQVQLVQSGGGLVQPGGSLRLSCAASGFTFSSYWMHWVRQAPGKGLVWVSRINSDGSSTSYADSVKGRFTISRDNAKNTLYLQMNSLRAEDTAVYYCVRTGWVGSYYYYMDVWGKGTTVTVSSGGGGSGGGGSGGGGSGGGGSEIVLTQSPGTLSLSPGERATLSCRASQSVSSNYLAWYQQKPGQPPRLLIYDVSTRATGIPARFSGGGSGTDFTLTISSLEPEDFAVYYCQQRSNWPPWTFGQGTKVEIKTTTPAPRPPTPAPTIASQPLSLRPEACRPAAGGAVHTRGLDFACDIYIWAPLAGTCGVLLLSLVITLYCKRGRKKLLYIFKQPFMRPVQTTQEEDGCSCRFPEEEEGGCELRVKFSRSADAPAYKQGQNQLYNELNLGRREEYDVLDKRRGRDPEMGGKPRRKNPQEGLYNELQKDKMAEAYSEIGMKGERRRGKGHDGLYQGLSTATKDTYDALHMQALPPR

SEQ ID NO: 2364 - protein, 494 aa, Artificial Sequence
  source: /note="Description of Artificial Sequence: Synthetic Chimeric Antigen Receptor sequence"
MALPVTALLLPLALLLHAARPQVQLVQSGGGVVQPGRSLRLSCAASGFTFSSYGMHWVRQAPGKGLEWVAVISYDGSNKYYADSVKGRFTISRDNSKNTLYLQMNSLRAEDTAVYYCAKGYSRYYYYGMDVWGQGTTVTVSSGGGGSGGGGSGGGGSGGGGSEIVMTQSPATLSLSPGERAILSCRASQSVYTKYLGWYQQKPGQAPRLLIYDASTRATGIPDRFSGSGSGTDFTLTINRLEPEDFAVYYCQHYGGSPLITFGQGTKVDIKTTTPAPRPPTPAPTIASQPLSLRPEACRPAAGGAVHTRGLDFACDIYIWAPLAGTCGVLLLSLVITLYCKRGRKKLLYIFKQPFMRPVQTTQEEDGCSCRFPEEEEGGCELRVKFSRSADAPAYKQGQNQLYNELNLGRREEYDVLDKRRGRDPEMGGKPRRKNPQEGLYNELQKDKMAEAYSEIGMKGERRRGKGHDGLYQGLSTATKDTYDALHMQALPPR

SEQ ID NO: 2365 - protein, 497 aa, Artificial Sequence
  source: /note="Description of Artificial Sequence: Synthetic Chimeric Antigen Receptor sequence"
MALPVTALLLPLALLLHAARPQVQLVQSGAEVKKPGASVKVSCKASGYTFTGYYMHWVRQAPGQGLEWMGWINPNSGGTNYAQKFQGRVTMTRDTSISTAYMELSRLRSDDTAVYYCARDLRRTVVTPRAYYGMDVWGQGTTVTVSSGGGGSGGGGSGGGGSGGGGSDIQLTQSPSTLSASVGDRVTITCQASQDISNSLNWYQQKAGKAPKLLIYDASTLETGVPSRFSGSGSGTDFSFTISSLQPEDIATYYCQQHDNLPLTFGQGTKVEIKTTTPAPRPPTPAPTIASQPLSLRPEACRPAAGGAVHTRGLDFACDIYIWAPLAGTCGVLLLSLVITLYCKRGRKKLLYIFKQPFMRPVQTTQEEDGCSCRFPEEEEGGCELRVKFSRSADAPAYKQGQNQLYNELNLGRREEYDVLDKRRGRDPEMGGKPRRKNPQEGLYNELQKDKMAEAYSEIGMKGERRRGKGHDGLYQGLSTATKDTYDALHMQALPPR

SEQ ID NO: 2366 - protein, 493 aa, Artificial Sequence
  source: /note="Description of Artificial Sequence: Synthetic Chimeric Antigen Receptor sequence"
MALPVTALLLPLALLLHAARPQVQLVQSGGGLVQPGGSLRLSCAASGFTFSSYAMSWVRQAPGKGLEWVSAISGSGGSTYYADSVKGRFTISRDNSKNTLYLQMNSLRAEDTAVYYCAKREAAAGHDWYFDLWGRGTLVTVSSGGGGSGGGGSGGGGSGGGGSDIRVTQSPSSLSASVGDRVTITCRASQSISSYLNWYQQKPGKAPKLLIYAASSLQSGVPSRFSGSGSGTDFTLTISSLQPEDFATYYCQQSYSIPLTFGQGTKVEIKTTTPAPRPPTPAPTIASQPLSLRPEACRPAAGGAVHTRGLDFACDIYIWAPLAGTCGVLLLSLVITLYCKRGRKKLLYIFKQPFMRPVQTTQEEDGCSCRFPEEEEGGCELRVKFSRSADAPAYKQGQNQLYNELNLGRREEYDVLDKRRGRDPEMGGKPRRKNPQEGLYNELQKDKMAEAYSEIGMKGERRRGKGHDGLYQGLSTATKDTYDALHMQALPPR

SEQ ID NO: 2367 - protein, 491 aa, Artificial Sequence
  source: /note="Description of Artificial Sequence: Synthetic Chimeric Antigen Receptor sequence"
MALPVTALLLPLALLLHAARPQVQLVQSWAEVKKPGASVKVSCKASGYTFTSYYMHWVRQAPGQGLEWMGIINPSGGSTSYAQKFQGRVTMTRDTSTSTVYMELSNLRSEDTAVYYCARSPRVTTGYFDYWGQGTLVTVSSGGGGSGGGGSGGGGSGGGGSDIQLTQSPSTLSASVGDRVTITCRASQSISSWLAWYQQKPGKAPKLLIYKASSLESGVPSRFSGSGSGTEFTLTISSLQPDDFATYYCQQYSSYPLTFGGGTRLEIKTTTPAPRPPTPAPTIASQPLSLRPEACRPAAGGAVHTRGLDFACDIYIWAPLAGTCGVLLLSLVITLYCKRGRKKLLYIFKQPFMRPVQTTQEEDGCSCRFPEEEEGGCELRVKFSRSADAPAYKQGQNQLYNELNLGRREEYDVLDKRRGRDPEMGGKPRRKNPQEGLYNELQKDKMAEAYSEIGMKGERRRGKGHDGLYQGLSTATKDTYDALHMQALPPR

SEQ ID NO: 2368 - protein, 497 aa, Artificial Sequence
  source: /note="Description of Artificial Sequence: Synthetic Chimeric Antigen Receptor sequence"
MALPVTALLLPLALLLHAARPQVQLVQSGAEVRRPGASVKISCRASGDTSTRHYIHWLRQAPGQGPEWMGVINPTTGPATGSPAYAQMLQGRVTMTRDTSTRTVYMELRSLRFEDTAVYYCARSVVGRSAPYYFDYWGQGTLVTVSSGGGGSGGGGSGGGGSGGGGSDIQMTQSPSSLSASVGDRVTITCRASQGISDYSAWYQQKPGKAPKLLIYAASTLQSGVPSRFSGSGSGTDFTLTISYLQSEDFATYYCQQYYSYPLTFGGGTKVDIKTTTPAPRPPTPAPTIASQPLSLRPEACRPAAGGAVHTRGLDFACDIYIWAPLAGTCGVLLLSLVITLYCKRGRKKLLYIFKQPFMRPVQTTQEEDGCSCRFPEEEEGGCELRVKFSRSADAPAYKQGQNQLYNELNLGRREEYDVLDKRRGRDPEMGGKPRRKNPQEGLYNELQKDKMAEAYSEIGMKGERRRGKGHDGLYQGLSTATKDTYDALHMQALPPR

SEQ ID NO: 2369 - protein, 493 aa, Artificial Sequence
  source: /note="Description of Artificial Sequence: Synthetic Chimeric Antigen Receptor sequence"
MALPVTALLLPLALLLHAARPQVQLQQSGAEVKKPGASVKVSCKASGYTFTNYYMHWVRQAPGQGLEWMGIINPSGGYTTYAQKFQGRLTMTRDTSTSTVYMELSSLRSEDTAVYYCARIRSCGGDCYYFDNWGQGTLVTVSSGGGGSGGGGSGGGGSGGGGSDIQLTQSPSTLSASVGDRVTITCRASENVNIWLAWYQQKPGKAPKLLIYKSSSLASGVPSRFSGSGSGAEFTLTISSLQPDDFATYYCQQYQSYPLTFGGGTKVDIKTTTPAPRPPTPAPTIASQPLSLRPEACRPAAGGAVHTRGLDFACDIYIWAPLAGTCGVLLLSLVITLYCKRGRKKLLYIFKQPFMRPVQTTQEEDGCSCRFPEEEEGGCELRVKFSRSADAPAYKQGQNQLYNELNLGRREEYDVLDKRRGRDPEMGGKPRRKNPQEGLYNELQKDKMAEAYSEIGMKGERRRGKGHDGLYQGLSTATKDTYDALHMQALPPR

SEQ ID NO: 2370 - protein, 490 aa, Artificial Sequence
  source: /note="Description of Artificial Sequence: Synthetic Chimeric Antigen Receptor sequence"
MALPVTALLLPLALLLHAARPQITLKESGPALVKPTQTLTLTCTFSGFSLSTAGVHVGWIRQPPGKALEWLALISWADDKRYRPSLRSRLDITRVTSKDQVVLSMTNMQPEDTATYYCALQGFDGYEANWGPGTLVTVSSGGGGSGGGGSGGGGSGGGGSDIVMTQSPSSLSASAGDRVTITCRASRGISSALAWYQQKPGKPPKLLIYDASSLESGVPSRFSGSGSGTDFTLTIDSLEPEDFATYYCQQSYSTPWTFGQGTKVDIKTTTPAPRPPTPAPTIASQPLSLRPEACRPAAGGAVHTRGLDFACDIYIWAPLAGTCGVLLLSLVITLYCKRGRKKLLYIFKQPFMRPVQTTQEEDGCSCRFPEEEEGGCELRVKFSRSADAPAYKQGQNQLYNELNLGRREEYDVLDKRRGRDPEMGGKPRRKNPQEGLYNELQKDKMAEAYSEIGMKGERRRGKGHDGLYQGLSTATKDTYDALHMQALPPR

SEQ ID NO: 2371 - protein, 490 aa, Artificial Sequence
  source: /note="Description of Artificial Sequence: Synthetic Chimeric Antigen Receptor sequence"
MALPVTALLLPLALLLHAARPQVQLVQSGAEVKKPGAPVKVSCKASGYTFTGYYMHWVRQAPGQGLEWMGWINPNSGGTNYAQKFQGRVTMTRDTSISTAYMELSRLRSDDTAVYYCARGEWDGSYYYDYWGQGTLVTVSSGGGGSGGGGSGGGGSGGGGSDIVLTQTPSSLSASVGDRVTITCRASQSINTYLNWYQHKPGKAPKLLIYAASSLQSGVPSRFSGSGSGTDFTLTISSLQPEDFATYYCQQSFSPLTFGGGTKLEIKTTTPAPRPPTPAPTIASQPLSLRPEACRPAAGGAVHTRGLDFACDIYIWAPLAGTCGVLLLSLVITLYCKRGRKKLLYIFKQPFMRPVQTTQEEDGCSCRFPEEEEGGCELRVKFSRSADAPAYKQGQNQLYNELNLGRREEYDVLDKRRGRDPEMGGKPRRKNPQEGLYNELQKDKMAEAYSEIGMKGERRRGKGHDGLYQGLSTATKDTYDALHMQALPPR

SEQ ID NO: 2372 - protein, 486 aa, Artificial Sequence
  source: /note="Description of Artificial Sequence: Synthetic Chimeric Antigen Receptor sequence"
MALPVTALLLPLALLLHAARPQVQLVESGGGLVQPGGSLRLSCAASGFTFSSYWMHWVRQVPGKGLVWVSRINTDGSTTTYADSVEGRFTISRDNAKNTLYLQMNSLRDDDTAVYYCVGGHWAVWGQGTTVTVSSGGGGSGGGGSGGGGSGGGGSDIQMTQSPSTLSASVGDRVTITCRASQSISDRLAWYQQKPGKAPKLLIYKASSLESGVPSRFSGSGSGTEFTLTISSLQPDDFAVYYCQQYGHLPMYTFGQGTKVEIKTTTPAPRPPTPAPTIASQPLSLRPEACRPAAGGAVHTRGLDFACDIYIWAPLAGTCGVLLLSLVITLYCKRGRKKLLYIFKQPFMRPVQTTQEEDGCSCRFPEEEEGGCELRVKFSRSADAPAYKQGQNQLYNELNLGRREEYDVLDKRRGRDPEMGGKPRRKNPQEGLYNELQKDKMAEAYSEIGMKGERRRGKGHDGLYQGLSTATKDTYDALHMQALPPR

SEQ ID NO: 2373 - protein, 485 aa, Artificial Sequence
  source: /note="Description of Artificial Sequence: Synthetic Chimeric Antigen Receptor sequence"
MALPVTALLLPLALLLHAARPQVQLVQSGAEVEKPGASVKVSCKASGYTFTDYYMHWVRQAPGQGLEWMGWINPNSGGTNYAQKFQGRVTMTRDTSISTAYMELSRLRSDDTAVYYCASGWDFDYWGQGTLVTVSSGGGGSGGGGSGGGGSGGGGSDIVMTQSPSSLSASVGDRVTITCRASQSIRYYLSWYQQKPGKAPKLLIYTASILQNGVPSRFSGSGSGTDFTLTISSLQPEDFATYYCLQTYTTPDFGPGTKVEIKTTTPAPRPPTPAPTIASQPLSLRPEACRPAAGGAVHTRGLDFACDIYIWAPLAGTCGVLLLSLVITLYCKRGRKKLLYIFKQPFMRPVQTTQEEDGCSCRFPEEEEGGCELRVKFSRSADAPAYKQGQNQLYNELNLGRREEYDVLDKRRGRDPEMGGKPRRKNPQEGLYNELQKDKMAEAYSEIGMKGERRRGKGHDGLYQGLSTATKDTYDALHMQALPPR

SEQ ID NO: 2374 - protein, 497 aa, Artificial Sequence
  source: /note="Description of Artificial Sequence: Synthetic Chimeric Antigen Receptor sequence"
MALPVTALLLPLALLLHAARPQVQLVQSGAEVKKPGASVKVSCKASGYTFTSYYMHWVRQAPGQGLEWMGIINPSGGSTSYAQKFQGRVTMTRDTSTSTVYMELSSLRSEDTAVYYCARYRLIAVAGDYYYYGMDVWGQGTMVTVSSGGGGSGGGGSGGGGSGGGGSDIQMTQSPSSVSASVGDRVTITCRASQGVGRWLAWYQQKPGTAPKLLIYAASTLQSGVPSRFSGSGSGTDFTLTINNLQPEDFATYYCQQANSFPLTFGGGTRLEIKTTTPAPRPPTPAPTIASQPLSLRPEACRPAAGGAVHTRGLDFACDIYIWAPLAGTCGVLLLSLVITLYCKRGRKKLLYIFKQPFMRPVQTTQEEDGCSCRFPEEEEGGCELRVKFSRSADAPAYKQGQNQLYNELNLGRREEYDVLDKRRGRDPEMGGKPRRKNPQEGLYNELQKDKMAEAYSEIGMKGERRRGKGHDGLYQGLSTATKDTYDALHMQALPPR

SEQ ID NO: 2375 - protein, 494 aa, Artificial Sequence
  source: /note="Description of Artificial Sequence: Synthetic Chimeric Antigen Receptor sequence"
MALPVTALLLPLALLLHAARPQVQLVQSGGGVVQPGRSLRLSCAASGFTFSSYAMHWVRQAPGKGLEWVAVISYDGSNKYYADSVKGRFTISRDNSKNTLYLQMNSLRAEDTAVYYCARWKVSSSSPAFDYWGQGTLVTVSSGGGGSGGGGSGGGGSGGGGSEIVLTQSPATLSLSPGERAILSCRASQSVYTKYLGWYQQKPGQAPRLLIYDASTRATGIPDRFSGSGSGTDFTLTINRLEPEDFAVYYCQHYGGSPLITFGQGTRLEIKTTTPAPRPPTPAPTIASQPLSLRPEACRPAAGGAVHTRGLDFACDIYIWAPLAGTCGVLLLSLVITLYCKRGRKKLLYIFKQPFMRPVQTTQEEDGCSCRFPEEEEGGCELRVKFSRSADAPAYKQGQNQLYNELNLGRREEYDVLDKRRGRDPEMGGKPRRKNPQEGLYNELQKDKMAEAYSEIGMKGERRRGKGHDGLYQGLSTATKDTYDALHMQALPPR

SEQ ID NO: 2376 - protein, 490 aa, Artificial Sequence
  source: /note="Description of Artificial Sequence: Synthetic Chimeric Antigen Receptor sequence"
MALPVTALLLPLALLLHAARPQVQLQQSGAEVKKPGASVKVSCKTSGYPFTGYSLHWVRQAPGQGLEWMGWINPNSGGTNYAQKFQGRVTMTRDTSISTAYMELSRLRSDDTAVYYCARDHYGGNSLFYWGQGTLVTVSSGGGGSGGGGSGGGGSGGGGSDIQLTQSPSSISASVGDTVSITCRASQDSGTWLAWYQQKPGKAPNLLMYDASTLEDGVPSRFSGSASGTEFTLTVNRLQPEDSATYYCQQYNSYPLTFGGGTKVDIKTTTPAPRPPTPAPTIASQPLSLRPEACRPAAGGAVHTRGLDFACDIYIWAPLAGTCGVLLLSLVITLYCKRGRKKLLYIFKQPFMRPVQTTQEEDGCSCRFPEEEEGGCELRVKFSRSADAPAYKQGQNQLYNELNLGRREEYDVLDKRRGRDPEMGGKPRRKNPQEGLYNELQKDKMAEAYSEIGMKGERRRGKGHDGLYQGLSTATKDTYDALHMQALPPR

SEQ ID NO: 2377 - protein, 492 aa, Artificial Sequence
  source: /note="Description of Artificial Sequence: Synthetic Chimeric Antigen Receptor sequence"
MALPVTALLLPLALLLHAARPQVQLVQSGAEVKKPGASVEVSCKASGYTFTSYYMHWVRQAPGQGLEWMGIINPSGGSTGYAQKFQGRVTMTRDTSTSTVHMELSSLRSEDTAVYYCARGGYSSSSDAFDIWGQGTMVTVSSGGGGSGGGGSGGGGSGGGGSDIQMTQSPPSLSASVGDRVTITCRASQDISSALAWYQQKPGTPPKLLIYDASSLESGVPSRFSGSGSGTDFTLTISSLQPEDFATYYCQQFSSYPLTFGGGTRLEIKTTTPAPRPPTPAPTIASQPLSLRPEACRPAAGGAVHTRGLDFACDIYIWAPLAGTCGVLLLSLVITLYCKRGRKKLLYIFKQPFMRPVQTTQEEDGCSCRFPEEEEGGCELRVKFSRSADAPAYKQGQNQLYNELNLGRREEYDVLDKRRGRDPEMGGKPRRKNPQEGLYNELQKDKMAEAYSEIGMKGERRRGKGHDGLYQGLSTATKDTYDALHMQALPPR

SEQ ID NO: 2378 - protein, 356 aa, Artificial Sequence
  source: /note="Description of Artificial Sequence: Synthetic Chimeric Antigen Receptor sequence"
MALPVTALLLPLALLLHAARPPGWFLDSPDRPWNPPTFSPALLVVTEGDNATFTCSFSNTSESFVLNWYRMSPSNQTDKLAAFPEDRSQPGQDCRFRVTQLPNGRDFHMSVVRARRNDSGTYLCGAISLAPKAQIKESLRAELRVTERRAEVPTARPSPSPRPAGQFQTLVTTTPAPRPPTPAPTIASQPLSLRPEACRPAAGGAVHTRGLDFACDIYIWAPLAGTCGVLLLSLVITLYCKRGRKKLLGGGGSGGGGSASRILWHEMWHEGLEEASRLYFGERNVKGMFEVLEPLHAMMERGPQTLKETSFNQAYGRDLMEAQEWCRKYMKSGNVKDLLQAWDLYYHVFRRISKTS

SEQ ID NO: 2379 - protein, 1701 aa, Artificial Sequence
  source: /note="Description of Artificial Sequence: Synthetic Chimeric Antigen Receptor sequence"
MSLPVTALLLPLALLLHAARPDIQMTQTTSSLSASLGDRVTISCRASQDISKYLNWYQQKPDGTVKLLIYHTSRLHSGVPSRFSGSGSGTDYSLTISNLEQEDIATYFCQQGNTLPYTFGGGTKLEITKAGGGGSGGGGSGGGGSGGGGSEVKLQESGPGLVAPSQSLSVTCTVSGVSLPDYGVSWIRQPPRKGLEWLGVIWGSETTYYNSALKSRLTMKDNSKSQVFLKMNSLQTDDTAIYYCAKHYYYGGSYAMDYWGQGTSVTVSSDPTTTPAPRPPTPAPTIASQPLSLRPEACRPAAGGAVHTRGLDFACDIFVWLVWGGVLACYSLLVTVAFIIFWVRRVKFSRSADAPAYQQGQQLYNELNLGRREEYDVLDKRRGRDPEMGGKPRRKNPQEGLYNELQKDMAEAYSEIGMKGERRRGKGHDGLYQGLSTATKDTYDALHMQALPPRRAEGRGSLLTCGDVEENPGPMAVPTQVLGLLLLWLTDARCDIQMTQSPSSLSASVGDRVTITCRASEDIYFNLVWYQQKPGKAPKLLIYDTNRLADGVPSRFSGSGSGTQYTLTISSLQPEDFATYYCQHYKNYPLTFGQGTKLEIKRSGGGGSGGGGSGGGGSGGGGSRSEVQLVESGGGLVQPGGSLRLSCAASGFTLSNYGMHWIRQAPGKGLEWVSSISLNGGSTYYRDSVKGRFTISRDNAKSTLYLQMNSLRAEDTAVYYCAAQDAYTGGYFDYWGQGTLVTVSSMDPAEPKSPDKTHTCPPCPAPPVAGPSVFLFPPKPKDTLMIARTPEVTCVWDVSHEDPEVKFNWYVDGVEVHNAKTKPREEQYNSTYRWSVLTVLHQDWLNGKEYKCKVSNKALPAPIEKTISKAKGQPREPQVYTLPPSRDELTNQVSLTCLVKGFYPSDIAVEWESNGQPENNYKTTPPVLDSDGSFFLYSKLTVDKSRWQQGNVFSCSVMHEALHNHYTQKSLSLSPGKKDPKALIAFLAFLIIVTSIALLWLYKIYDLHKKRSCNLDEQQELVERDDEKQLMNVEPIHADILLETYKRKIADEGRLFLAEFQSIPRVFSKFPIEARKPFNQNKNRYVDILPYDYNRVELSEINGDAGSNYINASYIDGFKEPRKYIAAQGPRDETVDDFWRMIWEQKATVIVMVTRCEEGNRNKCAEYWPSMEEGTRAFGDVWKINQHKRCPDYIIQKLNIVNKKEKATGREVTHIQFTSWPDHGVPEDPHLLLKLRRRVNAFSNFFSGPIWHCSAGVGRTGTYIGIDAMLEGLEAENKVDVYGYWKLRRQRCLMVQVEAQYILIHQALVEYNQFGETEVNLSELHPYLHNMKKRDPPSEPSPLEAEFQRLPSYRSWRTQHIGNQEENKSKNRNSNVIPYDYNRVPLKHELEMSKESEHDSDESSDDDSDSEEPSKYINASFIMSYWKPEVMIAAQGPLKETIGDFWQMIFQRKVKVIVMLTELKHGDQEICAQYWGEGKQTYGDIEVDLDTDKSSTYTLRVFELRHSKRKDSRTVYQYQYTNWSVEQLPAEPKELISMIQWKQKLPQKNSSEGNKHHKSTPLLIHCRDGSQQTGIFCALLNLLESAETEEWDIFQWKALRKARPGMVSTFEQYQFLYDVIASTYPAQNGQVKKNNHQEDKIEFDNEVDKVKQDANCVNPLGAPEKLPEAKEQAEGSEPTSGTEGPEHSVNGPASPALNQGS

SEQ ID NO: 2380 - protein, 378 aa, Artificial Sequence
  source: /note="Description of Artificial Sequence: Synthetic Chimeric Antigen Receptor sequence"
MALPVTALLLPLALLLHAARPGSGSGAQAAEVQLQQSGPELVKPGTSVRISCKTSGYTFTEYTIHWVKQSHGKSLEWIGNINPNNGGTTYNQKFEDKATLTVDKSSSTAYMELRSLTSEDSAVYYCAAGWNFDYWGQGTTVTVSSGGGGSGGGGSGGGGSDIVMTQSHKFMSTSVGDRVSIICKASQDVGTAVDWYQQKPGQSPKLLIYWASTRHTGVPDRFTGSGSGTDFTLTITNVQSEDLADYFCQQYNSYPLTFGAGTMLDLKRAAARSDPASGAGSGSGSAVKEGPPSEHSGISRNAIIFLVLGILVFLILLGIGIYFYWSKCSREVLWHCHLCPSSTEHASASANGHVSYSAVSRENSSSQDPQTEGTRSHG

SEQ ID NO: 2381 - protein, 386 aa, Artificial Sequence
  source: /note="Description of Artificial Sequence: Synthetic Chimeric Antigen Receptor sequence"
MALPVTALLLPLALLLHAARPGSGSGAQAAEVQLQQSGPELVKPGTSVRISCKTSGYTFTEYTIHWVKQSHGKSLEWIGNINPNNGGTTYNQKFEDKATLTVDKSSSTAYMELRSLTSEDSAVYYCAAGWNFDYWGQGTTVTVSSGGGGSGGGGSGGGGSDIVMTQSHKFMSTSVGDRVSIICKASQDVGTAVDWYQQKPGQSPKLLIYWASTRHTGVPDRFTGSGSGTDFTLTITNVQSEDLADYFCQQYNSYPLTFGAGTMLDLKRAAARSDPASGAGSGSGSAVQAPSSSPMGIIVAVVTGIAVAAIVAAVVALIYCRKKRISALPGYPECREMGETLPEKPANPTNPDEADKVGAENTITYSLLMHPDALEEPDDQNRISHG

SEQ ID NO: 2382 - protein, 404 aa, Artificial Sequence
  source: /note="Description of Artificial Sequence: Synthetic Chimeric Antigen Receptor sequence"
MALPVTALLLPLALLLHAARPGSGSGAQAAEVQLQQSGPELVKPGTSVRISCKTSGYTFTEYTIHWVKQSHGKSLEWIGNINPNNGGTTYNQKFEDKATLTVDKSSSTAYMELRSLTSEDSAVYYCAAGWNFDYWGQGTTVTVSSGGGGSGGGGSGGGGSDIVMTQSHKFMSTSVGDRVSIICKASQDVGTAVDWYQQKPGQSPKLLIYWASTRHTGVPDRFTGSGSGTDFTLTITNVQSEDLADYFCQQYNSYPLTFGAGTMLDLKRAAARSDPASGAGSGSGSASFRALPHAWSDPSDPLPVSVTGNSRYLHALIGTSVVIIPFAILLFFLLHRWCANKKNAVVMDQEPAGNRTVNREDSDEQDPQEVTYAQLNHCVFTQRKITRPSQRPKTPPTDTSVSHG

SEQ ID NO: 2383 - protein, 405 aa, Artificial Sequence
  source: /note="Description of Artificial Sequence: Synthetic Chimeric Antigen Receptor sequence"
MALPVTALLLPLALLLHAEVQLQQSGPELVKPGTSVRISCKTSGYTFTEYTIHWVKQSHGKSLEWIGNINPNNGGTTYNQKFEDKATLTVDKSSSTAYMELRSLTSEDSAVYYCAAGWNFDYWGQGTTVTVSSGGGGSGGGGSGGGGSDIVMTQSHKFMSTSVGDRVSIICKASQDVGTAVDWYQQKPGQSPKLLIYWASTRHTGVPDRFTGSGSGTDFTLTITNVQSEDLADYFCQQYNSYPLTFGAGTMLDLKRAAATERRAEVPTAHPSPSPRPAGQFQTLVVGVVGGLLGSLVLLVWVLAVICSRAARGTIGARRTGQPLKEDPSAVPVFSVDYGELDFQWREKTPEPPVPCVPEQTEYATIVFPSGMGTSSPARRGSADGPRSAQPLRPEDGHCSWPLSH

SEQ ID NO: 2384 - protein, 409 aa, Artificial Sequence
  source: /note="Description of Artificial Sequence: Synthetic Chimeric Antigen Receptor sequence"
MALPVTALLLPLALLLHAARPGSGSGAQAAEVQLQQSGPELVKPGTSVRISCKTSGYTFTEYTIHWVKQSHGKSLEWIGNINPNNGGTTYNQKFEDKATLTVDKSSSTAYMELRSLTSEDSAVYYCAAGWNFDYWGQGTTVTVSSGGGGSGGGGSGGGGSDIVMTQSHKFMSTSVGDRVSIICKASQDVGTAVDWYQQKPGQSPKLLIYWASTRHTGVPDRFTGSGSGTDFTLTITNVQSEDLADYFCQQYNSYPLTFGAGTMLDLKRAAARSDPASGAGSGSGSALFVHWKPEGRAGGVLGAVWGASITTLVFLCVCFIFRVKTRRKKAAQPVQNTDDVNPVMVSGSRGHQHQFQTGIVSDHPAEAGPISEDEQELHYAVLHFHKVQPQEPKVTDTEYSEIKIHKSHG

SEQ ID NO: 2385 - protein, 410 aa, Artificial Sequence
  source: /note="Description of Artificial Sequence: Synthetic Chimeric Antigen Receptor sequence"
MALPVTALLLPLALLLHAARPGSGSGAQAAEVQLQQSGPELVKPGTSVRISCKTSGYTFTEYTIHWVKQSHGKSLEWIGNINPNNGGTTYNQKFEDKATLTVDKSSSTAYMELRSLTSEDSAVYYCAAGWNFDYWGQGTTVTVSSGGGGSGGGGSGGGGSDIVMTQSHKFMSTSVGDRVSIICKASQDVGTAVDWYQQKPGQSPKLLIYWASTRHTGVPDRFTGSGSGTDFTLTITNVQSEDLADYFCQQYNSYPLTFGAGTMLDLKRAAARSDPASGAGSGSGSAGPDGYRRDLMTAGVLWGLFGVLGFTGVALLLYALFHKISGESSATNEPRGASRPNPQEFTYSSPTPDMEELQPVYVNVGSVDVDVVYSQVWSMQQPESSANIRTLLENKDSQVIYSSVKKSSHG

SEQ ID NO: 2386 - protein, 412 aa, Artificial Sequence
  source: /note="Description of Artificial Sequence: Synthetic Chimeric Antigen Receptor sequence"
MALPVTALLLPLALLLHAARPGSGSGAQAAEVQLQQSGPELVKPGTSVRISCKTSGYTFTEYTIHWVKQSHGKSLEWIGNINPNNGGTTYNQKFEDKATLTVDKSSSTAYMELRSLTSEDSAVYYCAAGWNFDYWGQGTTVTVSSGGGGSGGGGSGGGGSDIVMTQSHKFMSTSVGDRVSIICKASQDVGTAVDWYQQKPGQSPKLLIYWASTRHTGVPDRFTGSGSGTDFTLTITNVQSEDLADYFCQQYNSYPLTFGAGTMLDLKRAAARSDPASGAGSGSGSAPGHIRLYVVEKENLPVFPVWVVVGIVTAVVLGLTLLISMILAVLYRRKNSKRDYTGCSTSESLSPVKQAPRKSPSDTEGLVKSLPSGSHQGPVIYAQLDHSGGHHSDKINKSESVVYADIRKNSHG

SEQ ID NO: 2387 - protein, 416 aa, Artificial Sequence
  source: /note="Description of Artificial Sequence: Synthetic Chimeric Antigen Receptor sequence"
MALPVTALLLPLALLLHAARPGSGSGAQAAEVQLQQSGPELVKPGTSVRISCKTSGYTFTEYTIHWVKQSHGKSLEWIGNINPNNGGTTYNQKFEDKATLTVDKSSSTAYMELRSLTSEDSAVYYCAAGWNFDYWGQGTTVTVSSGGGGSGGGGSGGGGSDIVMTQSHKFMSTSVGDRVSIICKASQDVGTAVDWYQQKPGQSPKLLIYWASTRHTGVPDRFTGSGSGTDFTLTITNVQSEDLADYFCQQYNSYPLTFGAGTMLDLKRAAARSDPASGAGSGSGSALQSKATSGVTQGVVGGAGATALVFLSFCVIFVVVRSCRKKSARPAAGVGDTGIEDANAVRGSASQGPLTEPWAEDSPPDQPPPASARSSVGEGELQYASLSFQMVKPWDSRGQEATDTEYSEIKIHRSHG

SEQ ID NO: 2388 - protein, 419 aa, Artificial Sequence
  source: /note="Description of Artificial Sequence: Synthetic Chimeric Antigen Receptor sequence"
MALPVTALLLPLALLLHAARPGSGSGAQAAEVQLQQSGPELVKPGTSVRISCKTSGYTFTEYTIHWVKQSHGKSLEWIGNINPNNGGTTYNQKFEDKATLTVDKSSSTAYMELRSLTSEDSAVYYCAAGWNFDYWGQGTTVTVSSGGGGSGGGGSGGGGSDIVMTQSHKFMSTSVGDRVSIICKASQDVGTAVDWYQQKPGQSPKLLIYWASTRHTGVPDRFTGSGSGTDFTLTITNVQSEDLADYFCQQYNSYPLTFGAGTMLDLKRAAARSDPASGAGSGSGSAMPSTGGDSCPFCLKLLLPGLLLLLVVIILILAFWVLPKYKTRKAMRNNVPRDRGDTAMEVGIYANILEKQAKEESVPEVGSRPCVSTAQDEAKHSQELQYATPVFQEVAPREQEACDSYKSGYVYSELNFSHG

SEQ ID NO: 2389 - protein, 420 aa, Artificial Sequence
  source: /note="Description of Artificial Sequence: Synthetic Chimeric Antigen Receptor sequence"
MALPVTALLLPLALLLHAARPGSGSGAQAAEVQLQQSGPELVKPGTSVRISCKTSGYTFTEYTIHWVKQSHGKSLEWIGNINPNNGGTTYNQKFEDKATLTVDKSSSTAYMELRSLTSEDSAVYYCAAGWNFDYWGQGTTVTVSSGGGGSGGGGSGGGGSDIVMTQSHKFMSTSVGDRVSIICKASQDVGTAVDWYQQKPGQSPKLLIYWASTRHTGVPDRFTGSGSGTDFTLTITNVQSEDLADYFCQQYNSYPLTFGAGTMLDLKRAAARSDPASGAGSGSGSALQQEYTGKMRPVSGVLLGAVGGAGATALVFLSFCVIFIVVRSCRKKSARPAADVGDIGMKDANTIRGSASQGNLTESWADDNPRHHGLAAHSSGEEREIQYAPLSFHKGEPQDLSGQEATNNEYSEIKIPKSHG

SEQ ID NO: 2390 - protein, 422 aa, Artificial Sequence
  source: /note="Description of Artificial Sequence: Synthetic Chimeric Antigen Receptor sequence"
MALPVTALLLPLALLLHAARPGSGSGAQAAEVQLQQSGPELVKPGTSVRISCKTSGYTFTEYTIHWVKQSHGKSLEWIGNINPNNGGTTYNQKFEDKATLTVDKSSSTAYMELRSLTSEDSAVYYCAAGWNFDYWGQGTTVTVSSGGGGSGGGGSGGGGSDIVMTQSHKFMSTSVGDRVSIICKASQDVGTAVDWYQQKPGQSPKLLIYWASTRHTGVPDRFTGSGSGTDFTLTITNVQSEDLADYFCQQYNSYPLTFGAGTMLDLKRAAARSDPASGAGSGSGSALQNEYTGKMRPISGVTLGAFGGAGATALVFLYFCIIFVVVRSCRKKSARPAVGVGDTGMEDANAVRGSASQGPLIESPADDSPPHHAPPALATPSPEEGEIQYASLSFHKARPQYPQEQEAIGYEYSEINIPKSHG

SEQ ID NO: 2391 - protein, 425 aa, Artificial Sequence
  source: /note="Description of Artificial Sequence: Synthetic Chimeric Antigen Receptor sequence"
MALPVTALLLPLALLLHAARPGSGSGAQAAEVQLQQSGPELVKPGTSVRISCKTSGYTFTEYTIHWVKQSHGKSLEWIGNINPNNGGTTYNQKFEDKATLTVDKSSSTAYMELRSLTSEDSAVYYCAAGWNFDYWGQGTTVTVSSGGGGSGGGGSGGGGSDIVMTQSHKFMSTSVGDRVSIICKASQDVGTAVDWYQQKPGQSPKLLIYWASTRHTGVPDRFTGSGSGTDFTLTITNVQSEDLADYFCQQYNSYPLTFGAGTMLDLKRAAARSDPASGAGSGSGSALNVTYVPQNPTTGIFPGDGSGKQETRAGVVHGAIGGAGVTALLALCLCLIFFIVKTHRRKAARTAVGRNDTHPTTGSASPKHQKKSKLHGPTETSSCSGAAPTVEMDEELHYASLNFHGMNPSKDTSTEYSEVRTQSHG

SEQ ID NO: 2392 - protein, 425 aa, Artificial Sequence
  source: /note="Description of Artificial Sequence: Synthetic Chimeric Antigen Receptor sequence"
MALPVTALLLPLALLLHAARPGSGSGAQAAEVQLQQSGPELVKPGTSVRISCKTSGYTFTEYTIHWVKQSHGKSLEWIGNINPNNGGTTYNQKFEDKATLTVDKSSSTAYMELRSLTSEDSAVYYCAAGWNFDYWGQGTTVTVSSGGGGSGGGGSGGGGSDIVMTQSHKFMSTSVGDRVSIICKASQDVGTAVDWYQQKPGQSPKLLIYWASTRHTGVPDRFTGSGSGTDFTLTITNVQSEDLADYFCQQYNSYPLTFGAGTMLDLKRAAARSDPASGAGSGSGSAPYEWSNSSDPLLVSVTGNPSNSWPSPTEPSSETGNPRHLHVLIGTSVVIILFILLLFFLLHRWCCNKKNAVVMDQEPAGNRTVNREDSDEQDPQEVTYAQLNHCVFTQRKITRPSQRPKTPPTDIIVYTELPNAEPSHG

SEQ ID NO: 2393 - protein, 427 aa, Artificial Sequence
  source: /note="Description of Artificial Sequence: Synthetic Chimeric Antigen Receptor sequence"
MALPVTALLLPLALLLHAARPGSGSGAQAAEVQLQQSGPELVKPGTSVRISCKTSGYTFTEYTIHWVKQSHGKSLEWIGNINPNNGGTTYNQKFEDKATLTVDKSSSTAYMELRSLTSEDSAVYYCAAGWNFDYWGQGTTVTVSSGGGGSGGGGSGGGGSDIVMTQSHKFMSTSVGDRVSIICKASQDVGTAVDWYQQKPGQSPKLLIYWASTRHTGVPDRFTGSGSGTDFTLTITNVQSEDLADYFCQQYNSYPLTFGAGTMLDLKRAAARSDPASGAGSGSGSALNFTVPTGARSNHLTSGVIEGLLSTLGPATVALLFCYGLKRKIGRRSARDPLRSLPSPLPQEFTYLNSPTPGQLQPIYENVNVVSGDEVYSLAYYNQPEQESVAAETLGTHMEDKVSLDIYSRLRKANITDVDYEDAMSHG

SEQ ID NO: 2394 - protein, 430 aa, Artificial Sequence
  source: /note="Description of Artificial Sequence: Synthetic Chimeric Antigen Receptor sequence"
MALPVTALLLPLALLLHAARPGSGSGAQAAEVQLQQSGPELVKPGTSVRISCKTSGYTFTEYTIHWVKQSHGKSLEWIGNINPNNGGTTYNQKFEDKATLTVDKSSSTAYMELRSLTSEDSAVYYCAAGWNFDYWGQGTTVTVSSGGGGSGGGGSGGGGSDIVMTQSHKFMSTSVGDRVSIICKASQDVGTAVDWYQQKPGQSPKLLIYWASTRHTGVPDRFTGSGSGTDFTLTITNVQSEDLADYFCQQYNSYPLTFGAGTMLDLKRAAARSDPASGAGSGSGSAVTVRETPGNRDGLVAAGATGGLLSALLLAVALLFHCWRRRKSGVGFLGDETRLPPAPGPGESSHSICPAQVELQSLYVDVHPKKGDLVYSEIQTTQLGEEEEANTSRTLLEDKDVSVVYSEVKTQHPDNSAGKISSKDEESSHG

SEQ ID NO: 2395 - protein, 432 aa, Artificial Sequence
  source: /note="Description of Artificial Sequence: Synthetic Chimeric Antigen Receptor sequence"
MALPVTALLLPLALLLHAARPGSGSGAQAAEVQLQQSGPELVKPGTSVRISCKTSGYTFTEYTIHWVKQSHGKSLEWIGNINPNNGGTTYNQKFEDKATLTVDKSSSTAYMELRSLTSEDSAVYYCAAGWNFDYWGQGTTVTVSSGGGGSGGGGSGGGGSDIVMTQSHKFMSTSVGDRVSIICKASQDVGTAVDWYQQKPGQSPKLLIYWASTRHTGVPDRFTGSGSGTDFTLTITNVQSEDLADYFCQQYNSYPLTFGAGTMLDLKRAAARSDPASGAGSGSGSALYITGLTANRSGPFATGVAGGLLSIAGLAAGALLLYCWLSRKAGRKPASDPARSPPDSDSQEPTYHNVPAWEELQPVYTNANPRGENVVYSEVRIIQEKKKHAVASDPRHLRNKGSPIIYSEVKVASTPVSGSLFLASSAPHRSHG

SEQ ID NO: 2396 - protein, 432 aa, Artificial Sequence
  source: /note="Description of Artificial Sequence: Synthetic Chimeric Antigen Receptor sequence"
MALPVTALLLPLALLLHAARPGSGSGAQAAEVQLQQSGPELVKPGTSVRISCKTSGYTFTEYTIHWVKQSHGKSLEWIGNINPNNGGTTYNQKFEDKATLTVDKSSSTAYMELRSLTSEDSAVYYCAAGWNFDYWGQGTTVTVSSGGGGSGGGGSGGGGSDIVMTQSHKFMSTSVGDRVSIICKASQDVGTAVDWYQQKPGQSPKLLIYWASTRHTGVPDRFTGSGSGTDFTLTITNVQSEDLADYFCQQYNSYPLTFGAGTMLDLKRAAARSDPASGAGSGSGSAPYEWSKSSDPLLVSVTGNPSNSWPSPTEPSSKTGNPRHLHILIGTSVVIILFILLFFLLHRWCSNKKNAAVMDQESAGNRTANSEDSDEQDPQEVTYTQLNHCVFTQRKITRPSQRPKTPPTDIIVYTELPNAESRSKVVSCPSHG

SEQ ID NO: 2397 - protein, 432 aa, Artificial Sequence
  source: /note="Description of Artificial Sequence: Synthetic Chimeric Antigen Receptor sequence"
MALPVTALLLPLALLLHAARPGSGSGAQAAEVQLQQSGPELVKPGTSVRISCKTSGYTFTEYTIHWVKQSHGKSLEWIGNINPNNGGTTYNQKFEDKATLTVDKSSSTAYMELRSLTSEDSAVYYCAAGWNFDYWGQGTTVTVSSGGGGSGGGGSGGGGSDIVMTQSHKFMSTSVGDRVSIICKASQDVGTAVDWYQQKPGQSPKLLIYWASTRHTGVPDRFTGSGSGTDFTLTITNVQSEDLADYFCQQYNSYPLTFGAGTMLDLKRAAARSDPASGAGSGSGSAPYEWSNSSDPLLVSVIGNPSNSWPSPTEPSSKTGNPRHLHILIGTSVVIILFILLFFLLHRWCSNKKNAAVMDQESAGNRTANSEDSDEQDPQEVTYTQLNHCVFTQRKITRPSQRPKTPPTDIIVYAELPNAESRSKVVSCPSHG

SEQ ID NO: 2398 - protein, 432 aa, Artificial Sequence
  source: /note="Description of Artificial Sequence: Synthetic Chimeric Antigen Receptor sequence"
MALPVTALLLPLALLLHAARPGSGSGAQAAEVQLQQSGPELVKPGTSVRISCKTSGYTFTEYTIHWVKQSHGKSLEWIGNINPNNGGTTYNQKFEDKATLTVDKSSSTAYMELRSLTSEDSAVYYCAAGWNFDYWGQGTTVTVSSGGGGSGGGGSGGGGSDIVMTQSHKFMSTSVGDRVSIICKASQDVGTAVDWYQQKPGQSPKLLIYWASTRHTGVPDRFTGSGSGTDFTLTITNVQSEDLADYFCQQYNSYPLTFGAGTMLDLKRAAARSDPASGAGSGSGSAERRAEVPTAHPSPSPRPAGQFQTLVVGVVGGLLGSLVLLVWVLAVICSRAARGTIGARRTGQPLKEDPSAVPVFSVDYGELDFQWREKTPEPPVPCVPEQTEYATIVFPSGMGTSSPARRGSADGPRSAQPLRPEDGHCSWPLSHG

SEQ ID NO: 2399 - protein, 433 aa, Artificial Sequence
  source: /note="Description of Artificial Sequence: Synthetic Chimeric Antigen Receptor sequence"
MALPVTALLLPLALLLHAARPGSGSGAQAAEVQLQQSGPELVKPGTSVRISCKTSGYTFTEYTIHWVKQSHGKSLEWIGNINPNNGGTTYNQKFEDKATLTVDKSSSTAYMELRSLTSEDSAVYYCAAGWNFDYWGQGTTVTVSSGGGGSGGGGSGGGGSDIVMTQSHKFMSTSVGDRVSIICKASQDVGTAVDWYQQKPGQSPKLLIYWASTRHTGVPDRFTGSGSGTDFTLTITNVQSEDLADYFCQQYNSYPLTFGAGTMLDLKRAAARSDPASGAGSGSGSAPYEWSDPSDPLLVSVTGNPSSSWPSPTEPSSKSGNPRHLHILIGTSVVIILFILLLFFLLHLWCSNKKNAAVMDQEPAGNRTANSEDSDEQDPEEVTYAQLDHCVFTQRKITRPSQRPKTPPTDTILYTELPNAKPRSKVVSCPSHG

SEQ ID NO: 2400 - protein, 434 aa, Artificial Sequence
  source: /note="Description of Artificial Sequence: Synthetic Chimeric Antigen Receptor sequence"
QVQLQQSGAELVRPGASVTLSCKASGYTFSDYEMHWVIQTPVHGLEWIGAIDPETGGTAYNQKFKGKAILTADKSSSTAYMELRSLTSEDSAVYYCTGYYDYDSFTYWGQGTLVTVSAGGGGSGGGGSGGGGSDIVMTQSQKIMSTTVGDRVSITCKASQNVDAAVAWYQQKPGQSPKLLIYSASNRYTGVPDRFTGSGSGTDFTLTISNMQSEDLADYFCQQYDIYPYTFGGGTKLEIKGLAVSTISSFFPPGYQIYIWAPLAGTCGVLLLSLVITLYCKRGRKKLLYIFKQPFMRPVQTTQEEDGCSCRFPEEEEGGCELRVKFSRSADAPAYQQGQNQLYNELNLGRREEYDVLDKRRGRDPEMGGKPRRKNPQEGLYNELQKDKMAEAYSEIGMKGERRRGKGHDGLYQGLSTATKDTYDALHMQALPPR

SEQ ID NO: 2401 - protein, 436 aa, Artificial Sequence
  source: /note="Description of Artificial Sequence: Synthetic Chimeric Antigen Receptor sequence"
MALPVTALLLPLALLLHAARPGSGSGAQAAEVQLQQSGPELVKPGTSVRISCKTSGYTFTEYTIHWVKQSHGKSLEWIGNINPNNGGTTYNQKFEDKATLTVDKSSSTAYMELRSLTSEDSAVYYCAAGWNFDYWGQGTTVTVSSGGGGSGGGGSGGGGSDIVMTQSHKFMSTSVGDRVSIICKASQDVGTAVDWYQQKPGQSPKLLIYWASTRHTGVPDRFTGSGSGTDFTLTITNVQSEDLADYFCQQYNSYPLTFGAGTMLDLKRAAARSDPASGAGSGSGSAVRVILAPWKKGLIAVVIIGVIIALLIIAAKCYFLRKAKAKQMPVEMSRPAVPLLNSNNEKMSDPNMEANSHYGHNDDVGNHAMKPINDNKEPLNSDVQYTEVQVSSAESHKDLGKKDTETVYSEVRKAVPDAVESRYSRTEGSLDGTSHG

SEQ ID NO: 2402 - protein, 442 aa, Artificial Sequence
  source: /note="Description of Artificial Sequence: Synthetic Chimeric Antigen Receptor sequence"
MALPVTALLLPLALLLHAARPGSGSGAQAAEVQLQQSGPELVKPGTSVRISCKTSGYTFTEYTIHWVKQSHGKSLEWIGNINPNNGGTTYNQKFEDKATLTVDKSSSTAYMELRSLTSEDSAVYYCAAGWNFDYWGQGTTVTVSSGGGGSGGGGSGGGGSDIVMTQSHKFMSTSVGDRVSIICKASQDVGTAVDWYQQKPGQSPKLLIYWASTRHTGVPDRFTGSGSGTDFTLTITNVQSEDLADYFCQQYNSYPLTFGAGTMLDLKRAAARSDPASGAGSGSGSAQAVTTTTQRPSSMTTTWRLSSTTTTTGLRVTQGKRRSDSWHISLETAVGVAVAVTVLGIMILGLICLLRWRRRKGQQRTKATTPAREPFQNTEEPYENIRNEGQNTDPKLNPKDDGIVYASLALSSSTSPKAPPSHRPLKSPQNETLYSVLKASHG

SEQ ID NO: 2403 - protein, 444 aa, Artificial Sequence
  source: /note="Description of Artificial Sequence: Synthetic Chimeric Antigen Receptor sequence"
MALPVTALLLPLALLLHAARPGSGSGAQAAEVQLQQSGPELVKPGTSVRISCKTSGYTFTEYTIHWVKQSHGKSLEWIGNINPNNGGTTYNQKFEDKATLTVDKSSSTAYMELRSLTSEDSAVYYCAAGWNFDYWGQGTTVTVSSGGGGSGGGGSGGGGSDIVMTQSHKFMSTSVGDRVSIICKASQDVGTAVDWYQQKPGQSPKLLIYWASTRHTGVPDRFTGSGSGTDFTLTITNVQSEDLADYFCQQYNSYPLTFGAGTMLDLKRAAARSDPASGAGSGSGSAPCVWSNSSDPLLVSVTGNPSSSWPSPTEPSSKSGICRHLHVLIGTSVVIFLFILLLFFLLYRWCSNKKNAAVMDQEPAGDRTVNRQDSDEQDPQEVTYAQLDHCVFIQRKISRPSQRPKTPLTDTSVYTELPNAEPRSKVVSCPRAPQSGLEGVFSHG

SEQ ID NO: 2404 - protein, 444 aa, Artificial Sequence
  source: /note="Description of Artificial Sequence: Synthetic Chimeric Antigen Receptor sequence"
MALPVTALLLPLALLLHAARPGSGSGAQAAEVQLQQSGPELVKPGTSVRISCKTSGYTFTEYTIHWVKQSHGKSLEWIGNINPNNGGTTYNQKFEDKATLTVDKSSSTAYMELRSLTSEDSAVYYCAAGWNFDYWGQGTTVTVSSGGGGSGGGGSGGGGSDIVMTQSHKFMSTSVGDRVSIICKASQDVGTAVDWYQQKPGQSPKLLIYWASTRHTGVPDRFTGSGSGTDFTLTITNVQSEDLADYFCQQYNSYPLTFGAGTMLDLKRAAARSDPASGAGSGSGSALQNEGTGTSRPVSQVTLAAVGGAGATALAFLSFCIIFIIVRSCRKKSARPAAGVGDTGMEDAKAIRGSASQGPLTESWKDGNPLKKPPPAVAPSSGEEGELHYATLSFHKVKPQDPQGQEATDSEYSEIKIHKRETAETQACLRNHNPSSKEVRGSHG

SEQ ID NO: 2405 - protein, 460 aa, Artificial Sequence
  source: /note="Description of Artificial Sequence: Synthetic Chimeric Antigen Receptor sequence"
MALPVTALLLPLALLLHAARPGSGSGAQAAEVQLQQSGPELVKPGTSVRISCKTSGYTFTEYTIHWVKQSHGKSLEWIGNINPNNGGTTYNQKFEDKATLTVDKSSSTAYMELRSLTSEDSAVYYCAAGWNFDYWGQGTTVTVSSGGGGSGGGGSGGGGSDIVMTQSHKFMSTSVGDRVSIICKASQDVGTAVDWYQQKPGQSPKLLIYWASTRHTGVPDRFTGSGSGTDFTLTITNVQSEDLADYFCQQYNSYPLTFGAGTMLDLKRAAARSDPASGAGSGSGSAGTSRNRTGLTAAGITGLVLSILVLAAAAALLHYARARRKPGGLSATGTSSHSPSECQEPSSSRPSRIDPQEPTHSKPLAPMELEPMYSNANPGDSNPIYSQIWSIQHTKENSANCPMMHQEHEELTVLYSELKKTHPDDSAGEASSRGRAHEEDDEENYENVPRVLLASDHSHG

SEQ ID NO: 2406 - protein, 461 aa, Artificial Sequence
  source: /note="Description of Artificial Sequence: Synthetic Chimeric Antigen Receptor sequence"
MALPVTALLLPLALLLHAARPGSGSGAQAAEVQLQQSGPELVKPGTSVRISCKTSGYTFTEYTIHWVKQSHGKSLEWIGNINPNNGGTTYNQKFEDKATLTVDKSSSTAYMELRSLTSEDSAVYYCAAGWNFDYWGQGTTVTVSSGGGGSGGGGSGGGGSDIVMTQSHKFMSTSVGDRVSIICKASQDVGTAVDWYQQKPGQSPKLLIYWASTRHTGVPDRFTGSGSGTDFTLTITNVQSEDLADYFCQQYNSYPLTFGAGTMLDLKRAAARSDPASGAGSGSGSAGPSGDPSLSPTGSTPTPGPEDQPLTPTGLDPQSGLGRHLGVVTGVSVAFVLLLFLLLFLLLRHRHQSKHRTSAHFYRPAGAAGPEPKDQGLQKRASPVADIQEEILNAAVKDTQPKDGVEMDARAAASEAPQDVTYAQLHSLTLRREATEPPPSQEREPPAEPSIYAPLAIHSHG

SEQ ID NO: 2407 - protein, 464 aa, Artificial Sequence
  source: /note="Description of Artificial Sequence: Synthetic Chimeric Antigen Receptor sequence"
MALPVTALLLPLALLLHAARPGSGSGAQAAEVQLQQSGPELVKPGTSVRISCKTSGYTFTEYTIHWVKQSHGKSLEWIGNINPNNGGTTYNQKFEDKATLTVDKSSSTAYMELRSLTSEDSAVYYCAAGWNFDYWGQGTTVTVSSGGGGSGGGGSGGGGSDIVMTQSHKFMSTSVGDRVSIICKASQDVGTAVDWYQQKPGQSPKLLIYWASTRHTGVPDRFTGSGSGTDFTLTITNVQSEDLADYFCQQYNSYPLTFGAGTMLDLKRAAARSDPASGAGSGSGSAPYEWSDASDPLPVSVTGNPSSSWPSPTEPSFKTGIARHLHAVIRYSVAIILFTILPFFLLHRWCSKKKDAAVMNQEPAGHRTVNREDSDEQDPQEVTYAQLDHCIFTQRKITGPSQRSKRPSTDTSVCIELPNAEPRALSPAHEHHSQALMGSSRETTALSQTQLASSHVPAAGISHG

SEQ ID NO: 2408 - protein, 464 aa, Artificial Sequence
  source: /note="Description of Artificial Sequence: Synthetic Chimeric Antigen Receptor sequence"
MALPVTALLLPLALLLHAARPGSGSGAQAAEVQLQQSGPELVKPGTSVRISCKTSGYTFTEYTIHWVKQSHGKSLEWIGNINPNNGGTTYNQKFEDKATLTVDKSSSTAYMELRSLTSEDSAVYYCAAGWNFDYWGQGTTVTVSSGGGGSGGGGSGGGGSDIVMTQSHKFMSTSVGDRVSIICKASQDVGTAVDWYQQKPGQSPKLLIYWASTRHTGVPDRFTGSGSGTDFTLTITNVQSEDLADYFCQQYNSYPLTFGAGTMLDLKRAAARSDPASGAGSGSGSAPYEWSDPSDPLLVSVTGNSSSSSSSPTEPSSKTGIRRHLHILIGTSVAIILFIILFFFLLHCCCSNKKNAAVMDQEPAGDRTVNREDSDDQDPQEVTYAQLDHCVFTQTKITSPSQRPKTPPTDTTMYMELPNAKPRSLSPAHKHHSQALRGSSRETTALSQNRVASSHVPAAGISHG

SEQ ID NO: 2409 - protein, 468 aa, Artificial Sequence
  source: /note="Description of Artificial Sequence: Synthetic Chimeric Antigen Receptor sequence"
MALPVTALLLPLALLLHAARPGSGSGAQAAEVQLQQSGPELVKPGTSVRISCKTSGYTFTEYTIHWVKQSHGKSLEWIGNINPNNGGTTYNQKFEDKATLTVDKSSSTAYMELRSLTSEDSAVYYCAAGWNFDYWGQGTTVTVSSGGGGSGGGGSGGGGSDIVMTQSHKFMSTSVGDRVSIICKASQDVGTAVDWYQQKPGQSPKLLIYWASTRHTGVPDRFTGSGSGTDFTLTITNVQSEDLADYFCQQYNSYPLTFGAGTMLDLKRAAARSDPASGAGSGSGSAGPSMGSSPPPTGPISTPAGPEDQPLTPTGSDPQSGLGRHLGVVIGILVAVVLLLLLLLLLFLILRHRRQGKHWTSTQRKADFQHPAGAVGPEPTDRGLQWRSSPAADAQEENLYAAVKDTQPEDGVEMDTRAAASEAPQDVTYAQLHSLTLRRKATEPPPSQEREPPAEPSIYATLAIHSHG

SEQ ID NO: 2410 - protein, 495 aa, Artificial Sequence
  source: /note="Description of Artificial Sequence: Synthetic Chimeric Antigen Receptor sequence"
MALPVTALLLPLALLLHAARPGSGSGAQAAEVQLQQSGPELVKPGTSVRISCKTSGYTFTEYTIHWVKQSHGKSLEWIGNINPNNGGTTYNQKFEDKATLTVDKSSSTAYMELRSLTSEDSAVYYCAAGWNFDYWGQGTTVTVSSGGGGSGGGGSGGGGSDIVMTQSHKFMSTSVGDRVSIICKASQDVGTAVDWYQQKPGQSPKLLIYWASTRHTGVPDRFTGSGSGTDFTLTITNVQSEDLADYFCQQYNSYPLTFGAGTMLDLKRAAARSDPASGAGSGSGSAKNESAASSTGKTPAAEETVTTILGMLASPYHYLIIIVVLVIILAVVVVGFSCRKKFISYLKGICSGGGGGPERVHRVLFRRRSCPSRVPGAEDNARNETLSNRYLQPTQVSEQEIQGQELAELTGVTVELPEEPQRLLEQAEAEGCQRRRLLVPVNDADSADISTLLDASATLEEGHAKETIQDQLVGSEKLFYEEDEAGSATSCLSHG

SEQ ID NO: 2411 - protein, 501 aa, Artificial Sequence
  source: /note="Description of Artificial Sequence: Synthetic Chimeric Antigen Receptor sequence"
MALPVTALLLPLALLLHAARPGSGSGAQAAEVQLQQSGPELVKPGTSVRISCKTSGYTFTEYTIHWVKQSHGKSLEWIGNINPNNGGTTYNQKFEDKATLTVDKSSSTAYMELRSLTSEDSAVYYCAAGWNFDYWGQGTTVTVSSGGGGSGGGGSGGGGSDIVMTQSHKFMSTSVGDRVSIICKASQDVGTAVDWYQQKPGQSPKLLIYWASTRHTGVPDRFTGSGSGTDFTLTITNVQSEDLADYFCQQYNSYPLTFGAGTMLDLKRAAARSDPASGAGSGSGSAGHSGGSSLPPTGPPSTPGLGRYLEVLIGVSVAFVLLLFLLLFLLLRRQRHSKHRTSDQRKTDFQRPAGAAETEPKDRGLLRRSSPAADVQEENLYAAVKDTQSEDRVELDSQSPHDEDPQAVTYAPVKHSSPRREMASPPSSLSGEFLDTKDRQVEEDRQMDTEAAASEASQDVTYAQLHSLTLRRKATEPPPSQEGEPPAEPSIYATLAIHSHG

SEQ ID NO: 2412 - protein, 510 aa, Artificial Sequence
  source: /note="Description of Artificial Sequence: Synthetic Chimeric Antigen Receptor sequence"
MALPVTALLLPLALLLHAARPGSGSGAQAAEVQLQQSGPELVKPGTSVRISCKTSGYTFTEYTIHWVKQSHGKSLEWIGNINPNNGGTTYNQKFEDKATLTVDKSSSTAYMELRSLTSEDSAVYYCAAGWNFDYWGQGTTVTVSSGGGGSGGGGSGGGGSDIVMTQSHKFMSTSVGDRVSIICKASQDVGTAVDWYQQKPGQSPKLLIYWASTRHTGVPDRFTGSGSGTDFTLTITNVQSEDLADYFCQQYNSYPLTFGAGTMLDLKRAAARSDPASGAGSGSGSAVYSLPQLLGPSCSWEAEGLHCRCSFRAWPAPSLCWRLEEKPLEGNSSQGSFKVNSSSPGPWANSSLILHGGLNSDLKVSCKAWNIYGSQSGSVLLLQGRSNLGTGVVPAALGGAGVMALLCICLCLIFFLIVKARRKQAAGRPEKMDDEDPIMGTITSGSRKKPWPDSPGDQASPPGDAPPLEEQKELHYASLSFSEMKSREPKDQEAPSTTEYSEIKTSKSHG

SEQ ID NO: 2413 - protein, 519 aa, Artificial Sequence
  source: /note="Description of Artificial Sequence: Synthetic Chimeric Antigen Receptor sequence"
MALPVTALLLPLALLLHAARPGSGSGAQAAEVQLQQSGPELVKPGTSVRISCKTSGYTFTEYTIHWVKQSHGKSLEWIGNINPNNGGTTYNQKFEDKATLTVDKSSSTAYMELRSLTSEDSAVYYCAAGWNFDYWGQGTTVTVSSGGGGSGGGGSGGGGSDIVMTQSHKFMSTSVGDRVSIICKASQDVGTAVDWYQQKPGQSPKLLIYWASTRHTGVPDRFTGSGSGTDFTLTITNVQSEDLADYFCQQYNSYPLTFGAGTMLDLKRAAARSDPASGAGSGSGSAGSLEGPRPSPTRSVSTAAGPEDQPLMPTGSVPHSGLRRHWEVLIGVLVVSILLLSLLLFLLLQHWRQGKHRTLAQRQADFQRPPGAAEPEPKDGGLQRRSSPAADVQGENFCAAVKNTQPEDGVEMDTRQSPHDEDPQAVTYAKVKHSRPRREMASPPSPLSGEFLDTKDRQAEEDRQMDTEAAASEAPQDVTYAQLHSFTLRQKATEPPPSQEGASPAEPSVYATLAIHSHG

SEQ ID NO: 2414 - protein, 528 aa, Artificial Sequence
  source: /note="Description of Artificial Sequence: Synthetic Chimeric Antigen Receptor sequence"
MALPVTALLLPLALLLHAARPGSGSGAQAAEVQLQQSGPELVKPGTSVRISCKTSGYTFTEYTIHWVKQSHGKSLEWIGNINPNNGGTTYNQKFEDKATLTVDKSSSTAYMELRSLTSEDSAVYYCAAGWNFDYWGQGTTVTVSSGGGGSGGGGSGGGGSDIVMTQSHKFMSTSVGDRVSIICKASQDVGTAVDWYQQKPGQSPKLLIYWASTRHTGVPDRFTGSGSGTDFTLTITNVQSEDLADYFCQQYNSYPLTFGAGTMLDLKRAAARSDPASGAGSGSGSAVHKESGNGHNIWVILVVTLVVPLLLVAVLIVCCCIGSGCGGDPKCMDRVCFWRLGLLRGPGAEDNAHNEILSNADSLSTFVSEQQMESQEPADLTGVTVQSPGEAQCLLGPAEAEGSQRRRLLVPANGADPTETLMLFFDKFANIVPFDSWDQLMRQLDLTKNEIDVVRAGTAGPGDALYAMLMKWVNKTGRNASIHTLLDALERMEERHAKEKIQDLLVDSGKFIYLEDGTGSAVSLESHG

SEQ ID NO: 2415 - protein, 535 aa, Artificial Sequence
  source: /note="Description of Artificial Sequence: Synthetic Chimeric Antigen Receptor sequence"
MALPVTALLLPLALLLHAARPGSGSGAQAAEVQLQQSGPELVKPGTSVRISCKTSGYTFTEYTIHWVKQSHGKSLEWIGNINPNNGGTTYNQKFEDKATLTVDKSSSTAYMELRSLTSEDSAVYYCAAGWNFDYWGQGTTVTVSSGGGGSGGGGSGGGGSDIVMTQSHKFMSTSVGDRVSIICKASQDVGTAVDWYQQKPGQSPKLLIYWASTRHTGVPDRFTGSGSGTDFTLTITNVQSEDLADYFCQQYNSYPLTFGAGTMLDLKRAAARSDPASGAGSGSGSAVHYPPQLLGPSCSWEAEGLHCSCSSQASPAPSLRWWLGEELLEGNSSQGSFEVTPSSAGPWANSSLSLHGGLSSGLRLRCKAWNVHGAQSGSVFQLLPGKLEHGGGLGLGAALGAGVAALLAFCSCLVVFRVKICRKEARKRAAAEQDVPSTLGPISQGHQHECSAGSSQDHPPPGAATYTPGKGEEQELHYASLSFQGLRLWEPADQEAPSTTEYSEIKIHTGQPLRGPGFGLQLEREMSGMVPKSHG

SEQ ID NO: 2416 - protein, 545 aa, Artificial Sequence
  source: /note="Description of Artificial Sequence: Synthetic Chimeric Antigen Receptor sequence"
MALPVTALLLPLALLLHAARPGSGSGAQAAEVQLQQSGPELVKPGTSVRISCKTSGYTFTEYTIHWVKQSHGKSLEWIGNINPNNGGTTYNQKFEDKATLTVDKSSSTAYMELRSLTSEDSAVYYCAAGWNFDYWGQGTTVTVSSGGGGSGGGGSGGGGSDIVMTQSHKFMSTSVGDRVSIICKASQDVGTAVDWYQQKPGQSPKLLIYWASTRHTGVPDRFTGSGSGTDFTLTITNVQSEDLADYFCQQYNSYPLTFGAGTMLDLKRAAARSDPASGAGSGSGSAVHYSPKLLGPSCSWEAEGLHCSCSSQASPAPSLRWWLGEELLEGNSSQDSFEVTPSSAGPWANSSLSLHGGLSSGLRLRCEAWNVHGAQSGSILQLPDKKGLISTAFSNGAFLGIGITALLFLCLALIIMKILPKRRTQTETPRPRFSRHSTILDYINVVPTAGPLAQKRNQKATPNSPRTPLPPGAPSPESKKNQKKQYQLPSFPEPKSSTQAPESQESQEELHYATLNFPGVRPRPEARMPKGTQADYAEVKFQSHG

SEQ ID NO: 2417 - protein, 551 aa, Artificial Sequence
  source: /note="Description of Artificial Sequence: Synthetic Chimeric Antigen Receptor sequence"
MALPVTALLLPLALLLHAARPGSGSGAQAAEVQLQQSGPELVKPGTSVRISCKTSGYTFTEYTIHWVKQSHGKSLEWIGNINPNNGGTTYNQKFEDKATLTVDKSSSTAYMELRSLTSEDSAVYYCAAGWNFDYWGQGTTVTVSSGGGGSGGGGSGGGGSDIVMTQSHKFMSTSVGDRVSIICKASQDVGTAVDWYQQKPGQSPKLLIYWASTRHTGVPDRFTGSGSGTDFTLTITNVQSEDLADYFCQQYNSYPLTFGAGTMLDLKRAAARSDPASGAGSGSGSAVHKESGTKHSGEAPAVEETVTSSPGTPASPCSLSGIIIGVTVAAVVLIVAVFVCKSLLWKKVLPYLKGICSGGGGDPERVDRSSQRPGAEDNVLNEIVSILQPTQVPEQEMEVQEPAEPTGVNMLSPGESEHLLEPAEAERSQRRRLLVPANEGDPTETLRQCFDDFADLVPFDSWEPLMRKLGLMDNEIKVAKAEAAGHRDTLYTMLIKWVNKTGRDASVHTLLDALETLGERLAKQKIEDHLLSSGKFMYLEGNADSAMSSHG

SEQ ID NO: 2418 - protein, 670 aa, Artificial Sequence
  source: /note="Description of Artificial Sequence: Synthetic Chimeric Antigen Receptor sequence"
MALPVTALLLPLALLLHAEVQLQQSGPELVKPGTSVRISCKTSGYTFTEYTIHWVKQSHGKSLEWIGNINPNNGGTTYNQKFEDKATLTVDKSSSTAYMELRSLTSEDSAVYYCAAGWNFDYWGQGTTVTVSSGGGGSGGGGSGGGGSDIVMTQSHKFMSTSVGDRVSIICKASQDVGTAVDWYQQKPGQSPKLLIYWASTRHTGVPDRFTGSGSGTDFTLTITNVQSEDLADYFCQQYNSYPLTFGAGTMLDLKRAAATERRAEVPTAHPSPSPRPAGQFQTLVVGVVGGLLGSLVLLVWVLAVICSRAARGTIGARRTGQPLKEDPSAVPVFSVDYGELDFQWREKTPEPPVPCVPEQTEYATIVFPSGMGTSSPARRGSADGPRSAQPLRPEDGHCSWPLSHGGSGEGRGSLLTCGDVEENPGPHMVSKGEELFTGVVPILVELDGDVNGHKFSVSGEGEGDATYGKLTLKFICTTGKLPVPWPTLVTTLTYGVQCFSRYPDHMKQHDFFKSAMPEGYVQERTIFFKDDGNYKTRAEVKFEGDTLVNRIELKGIDFKEDGNILGHKLEYNYNSHNVYIMADKQKNGIKVNFKIRHNIEDGSVQLADHYQQNTPIGDGPVLLPDNHYLSTQSALSKDPNEKRDHMVLLEFVTAAGITLGMDELYKAAD

SEQ ID NO: 2419 - protein, 759 aa, Artificial Sequence
  source: /note="Description of Artificial Sequence: Synthetic Chimeric Antigen Receptor sequence"
MALPVTALLLPLALLLHAARPGSGSGAQAAEVQLQQSGPELVKPGTSVRISCKTSGYTFTEYTIHWVKQSHGKSLEWIGNINPNNGGTTYNQKFEDKATLTVDKSSSTAYMELRSLTSEDSAVYYCAAGWNFDYWGQGTTVTVSSGGGGSGGGGSGGGGSDIVMTQSHKFMSTSVGDRVSIICKASQDVGTAVDWYQQKPGQSPKLLIYWASTRHTGVPDRFTGSGSGTDFTLTITNVQSEDLADYFCQQYNSYPLTFGAGTMLDLKRAAARSDPASGAGSGSGSAKNESAASSTGKTPAAEETVTTILGMLASPYHYLIIIVVLVIILAVVVVGFSCRKKFISYLKGICSGGGGGPERVHRVLFRRRSCPSRVPGAEDNARNETLSNRYLQPTQVSEQEIQGQELAELTGVTVELPEEPQRLLEQAEAEGCQRRRLLVPVNDADSADISTLLDASATLEEGHAKETIQDQLVGSEKLFYEEDEAGSATSCLSHGGSGEGRGSLLTCGDVEENPGPHMVSKGEELFTGVVPILVELDGDVNGHKFSVSGEGEGDATYGKLTLKFICTTGKLPVPWPTLVTTLTYGVQCFSRYPDHMKQHDFFKSAMPEGYVQERTIFFKDDGNYKTRAEVKFEGDTLVNRIELKGIDFKEDGNILGHKLEYNYNSHNVYIMADKQKNGIKVNFKIRHNIEDGSVQLADHYQQNTPIGDGPVLLPDNHYLSTQSALSKDPNEKRDHMVLLEFVTAAGITLGMDELYKAAD

SEQ ID NO: 2420 - protein, 792 aa, Artificial Sequence
  source: /note="Description of Artificial Sequence: Synthetic Chimeric Antigen Receptor sequence"
MALPVTALLLPLALLLHAARPGSGSGAQAAEVQLQQSGPELVKPGTSVRISCKTSGYTFTEYTIHWVKQSHGKSLEWIGNINPNNGGTTYNQKFEDKATLTVDKSSSTAYMELRSLTSEDSAVYYCAAGWNFDYWGQGTTVTVSSGGGGSGGGGSGGGGSDIVMTQSHKFMSTSVGDRVSIICKASQDVGTAVDWYQQKPGQSPKLLIYWASTRHTGVPDRFTGSGSGTDFTLTITNVQSEDLADYFCQQYNSYPLTFGAGTMLDLKRAAARSDPASGAGSGSGSAVHKESGNGHNIWVILVVTLVVPLLLVAVLIVCCCIGSGCGGDPKCMDRVCFWRLGLLRGPGAEDNAHNEILSNADSLSTFVSEQQMESQEPADLTGVTVQSPGEAQCLLGPAEAEGSQRRRLLVPANGADPTETLMLFFDKFANIVPFDSWDQLMRQLDLTKNEIDVVRAGTAGPGDALYAMLMKWVNKTGRNASIHTLLDALERMEERHAKEKIQDLLVDSGKFIYLEDGTGSAVSLESHGGSGEGRGSLLTCGDVEENPGPHMVSKGEELFTGVVPILVELDGDVNGHKFSVSGEGEGDATYGKLTLKFICTTGKLPVPWPTLVTTLTYGVQCFSRYPDHMKQHDFFKSAMPEGYVQERTIFFKDDGNYKTRAEVKFEGDTLVNRIELKGIDFKEDGNILGHKLEYNYNSHNVYIMADKQKNGIKVNFKIRHNIEDGSVQLADHYQQNTPIGDGPVLLPDNHYLSTQSALSKDPNEKRDHMVLLEFVTAAGITLGMDELYKAAD

SEQ ID NO: 2421 - protein, 815 aa, Artificial Sequence
  source: /note="Description of Artificial Sequence: Synthetic Chimeric Antigen Receptor sequence"
MALPVTALLLPLALLLHAARPGSGSGAQAAEVQLQQSGPELVKPGTSVRISCKTSGYTFTEYTIHWVKQSHGKSLEWIGNINPNNGGTTYNQKFEDKATLTVDKSSSTAYMELRSLTSEDSAVYYCAAGWNFDYWGQGTTVTVSSGGGGSGGGGSGGGGSDIVMTQSHKFMSTSVGDRVSIICKASQDVGTAVDWYQQKPGQSPKLLIYWASTRHTGVPDRFTGSGSGTDFTLTITNVQSEDLADYFCQQYNSYPLTFGAGTMLDLKRAAARSDPASGAGSGSGSAVHKESGTKHSGEAPAVEETVTSSPGTPASPCSLSGIIIGVTVAAVVLIVAVFVCKSLLWKKVLPYLKGICSGGGGDPERVDRSSQRPGAEDNVLNEIVSILQPTQVPEQEMEVQEPAEPTGVNMLSPGESEHLLEPAEAERSQRRRLLVPANEGDPTETLRQCFDDFADLVPFDSWEPLMRKLGLMDNEIKVAKAEAAGHRDTLYTMLIKWVNKTGRDASVHTLLDALETLGERLAKQKIEDHLLSSGKFMYLEGNADSAMSSHGGSGEGRGSLLTCGDVEENPGPHMVSKGEELFTGVVPILVELDGDVNGHKFSVSGEGEGDATYGKLTLKFICTTGKLPVPWPTLVTTLTYGVQCFSRYPDHMKQHDFFKSAMPEGYVQERTIFFKDDGNYKTRAEVKFEGDTLVNRIELKGIDFKEDGNILGHKLEYNYNSHNVYIMADKQKNGIKVNFKIRHNIEDGSVQLADHYQQNTPIGDGPVLLPDNHYLSTQSALSKDPNEKRDHMVLLEFVTAAGITLGMDELYKAAD

SEQ ID NO: 2422 - protein, 346 aa, Artificial Sequence
  source: /note="Description of Artificial Sequence: Synthetic Chimeric Antigen Receptor sequence"
MDKDCEMKRTTLDSPLGKLELSGCEQGLHRIIFLGKGTSAADAVEVPAPAAVLGGPEPLMQATAWLNAYFHQPEAIEEFPVPALHHPVFQQESFTRQVLWKLLKVVKFGEVISYSHLAALAGNPAATAAVKTALSGNPVPILIPCHRVVQGDLDVGGYEGGLAVKEWLLAHEGHRLGKPGLGGGGGSGGGGSKRGRKKLLYIFKQPFMRPVQTTQEEDGCSCRFPEEEEGGCELRVKFSRSADAPAYKQGQNQLYNELNLGRREEYDVLDKRRGRDPEMGGKPRRKNPQEGLYNELQKDKMAEAYSEIGMKGERRRGKGHDGLYQGLSTATKDTYDALHMQALPPR

SEQ ID NO: 2423 - protein, 430 aa, Artificial Sequence
  source: /note="Description of Artificial Sequence: Synthetic Chimeric Antigen Receptor sequence"
EVKLQQSGPELVKPGASVKISCKTSGYTFTEYTMHWVKQSHGKSLEWIGGINPNNGGTSYNQKFKGKATLTVDKSSSTAYMELRSLTSEDSAVYYCALQGFAYWGQGTPLTVSSGGGGSGGGGSGGGGSMEIEITQTPALMSASPGEKVTMTCSASSSVSYMYWYQQKPRSSPKPWIYLTSNLASGVPARFSGSGSGTSYSLTISSMEAEDAATYYCQQWSSNPYTFGGGTRLELKGLAVSTISSFFPPGYQIYIWAPLAGTCGVLLLSLVITLYCKRGRKKLLYIFKQPFMRPVQTTQEEDGCSCRFPEEEEGGCELRVKFSRSADAPAYQQGQNQLYNELNLGRREEYDVLDKRRGRDPEMGGKPRRKNPQEGLYNELQKDKMAEAYSEIGMKGERRRGKGHDGLYQGLSTATKDTYDALHMQALPPR

SEQ ID NO: 2424 - protein, 432 aa, Artificial Sequence
  source: /note="Description of Artificial Sequence: Synthetic Chimeric Antigen Receptor sequence"
QVQLKESGPGLVAPSQTLSITCTVSGFSLTSYGVHWVRQPPGKGLEWLGVIWAGGFTNYNSALKSRLSISKDNSKSQVLLKMTSLQTDDTAMYYCARRGSSYSMDYWGQGTSVTVSSGGGGSGGGGSGGGGSEIVLSQSPAITAASLGQKVTITCSASSNVSYIHWYQQRSGTSPRPWIYEISKLASGVPVRFSGSGSGTSYSLTISSMEAEDAAIYYCQQWNYPLITFGSGTKLEIQGLAVSTISSFFPPGYQIYIWAPLAGTCGVLLLSLVITLYCKRGRKKLLYIFKQPFMRPVQTTQEEDGCSCRFPEEEEGGCELRVKFSRSADAPAYQQGQNQLYNELNLGRREEYDVLDKRRGRDPEMGGKPRRKNPQEGLYNELQKDKMAEAYSEIGMKGERRRGKGHDGLYQGLSTATKDTYDALHMQALPPR

SEQ ID NO: 2425 - protein, 433 aa, Artificial Sequence
  source: /note="Description of Artificial Sequence: Synthetic Chimeric Antigen Receptor sequence"
EVKLQQSGPELVKPGASVKISCKTSGYTFTEYTMHWVKQSHGKSLEWIGGINPNNGGTSYNQKFKGKATLTVDKSSSTAYMELRSLTSEDSAVYYCALQGFAYWGQGTPLTVSSGGGGSGGGGSGGGGSMEIEITQTPALMSASPGEKVTMTCSASSSVSYMYWYQQKPRSSPKPWIYLTSNLASGVPARFSGSGSGTSYSLTISSMEAEDAATYYCQQWSSNPYTFGGGTRLELKGLAVSTISSFFPPGYQIISFFLALTSTALLFLLFFLTLRFSVVKRGRKKLLYIFKQPFMRPVQTTQEEDGCSCRFPEEEEGGCELRVKFSRSADAPAYQQGQNQLYNELNLGRREEYDVLDKRRGRDPEMGGKPRRKNPQEGLYNELQKDKMAEAYSEIGMKGERRRGKGHDGLYQGLSTATKDTYDALHMQALPPR

SEQ ID NO: 2426 - protein, 434 aa, Artificial Sequence
  source: /note="Description of Artificial Sequence: Synthetic Chimeric Antigen Receptor sequence"
EVKLVESGGGLVKPGGSLKLSCAASGFTFSSYAMSWVRQTPEKRLEWVASISTGASAYFPDSVKGRFTISRDNARNILYLQMSSLRSEDTAMYYCARITTSTWYFDVWGAGTTVTVSSGGGGSGGGGSGGGGSDIKMTQSPSSMYASLGERVTITCKASQDINSYLSWFQQKPGKSPKTLIYRANRLVDGVPSRFSGSGSGQDYSLTISSLEYEDMGIYYCLQYDEFPYTFGGGTKLEIKGLAVSTISSFFPPGYQIYIWAPLAGTCGVLLLSLVITLYCKRGRKKLLYIFKQPFMRPVQTTQEEDGCSCRFPEEEEGGCELRVKFSRSADAPAYQQGQNQLYNELNLGRREEYDVLDKRRGRDPEMGGKPRRKNPQEGLYNELQKDKMAEAYSEIGMKGERRRGKGHDGLYQGLSTATKDTYDALHMQALPPR

SEQ ID NO: 2427 - protein, 435 aa, Artificial Sequence
  source: /note="Description of Artificial Sequence: Synthetic Chimeric Antigen Receptor sequence"
EVKLVESGGGLVKPGGSLKLSCAASGFTFSSYAMSWVRQIPEKRLEWVASISRGGTTYYPDSVKGRFTISRDNVRNILYLQMSSLRSEDTAMYYCGRYDYDGYYAMDYWGQGTSVTVSSGGGGSGGGGSGGGGSDIKMTQSPSSMYASLGERVTITCKASPDINSYLSWFQQKPGKSPKTLIYRANRLVDGVPSRFSGGGSGQDYSLTINSLEYEDMGIYYCLQYDEFPYTFGGGTKLEMKGLAVSTISSFFPPGYQIYIWAPLAGTCGVLLLSLVITLYCKRGRKKLLYIFKQPFMRPVQTTQEEDGCSCRFPEEEEGGCELRVKFSRSADAPAYQQGQNQLYNELNLGRREEYDVLDKRRGRDPEMGGKPRRKNPQEGLYNELQKDKMAEAYSEIGMKGERRRGKGHDGLYQGLSTATKDTYDALHMQALPPR

SEQ ID NO: 2428 - protein, 435 aa, Artificial Sequence
  source: /note="Description of Artificial Sequence: Synthetic Chimeric Antigen Receptor sequence"
EVQLQQSGPELEKPGASVKISCKASGFAFTGYNMNWVKQTNGKSLEWIGSIDPYYGGSTYNQKFKDKATLTVDKSSSTAYMQLKSLTSDDSAVYYCARSPGGDYAMDYWGQGTSVTVSSGGGGSGGGGSGGGGSDIKMTQSPSSMYASVGERVTITCKASQGINSYSGWFQQKPGKSPKTLIYRGNRLVDGVPSRFSGSGSGQDYSLTISSLEYEDMGIYYCLQYDEFPYTFGGGTKLEIKGLAVSTISSFFPPGYQIYIWAPLAGTCGVLLLSLVITLYCKRGRKKLLYIFKQPFMRPVQTTQEEDGCSCRFPEEEEGGCELRVKFSRSADAPAYQQGQNQLYNELNLGRREEYDVLDKRRGRDPEMGGKPRRKNPQEGLYNELQKDKMAEAYSEIGMKGERRRGKGHDGLYQGLSTATKDTYDALHMQALPPR

SEQ ID NO: 2429 - protein, 435 aa, Artificial Sequence
  source: /note="Description of Artificial Sequence: Synthetic Chimeric Antigen Receptor sequence"
QVQLKESGPGLVAPSQTLSITCTVSGFSLTSYGVHWVRQPPGKGLEWLGVIWAGGFTNYNSALKSRLSISKDNSKSQVLLKMTSLQTDDTAMYYCARRGSSYSMDYWGQGTSVTVSSGGGGSGGGGSGGGGSEIVLSQSPAITAASLGQKVTITCSASSNVSYIHWYQQRSGTSPRPWIYEISKLASGVPVRFSGSGSGTSYSLTISSMEAEDAAIYYCQQWNYPLITFGSGTKLEIQGLAVSTISSFFPPGYQIISFFLALTSTALLFLLFFLTLRFSVVKRGRKKLLYIFKQPFMRPVQTTQEEDGCSCRFPEEEEGGCELRVKFSRSADAPAYQQGQNQLYNELNLGRREEYDVLDKRRGRDPEMGGKPRRKNPQEGLYNELQKDKMAEAYSEIGMKGERRRGKGHDGLYQGLSTATKDTYDALHMQALPPR

SEQ ID NO: 2430 - protein, 435 aa, Artificial Sequence
  source: /note="Description of Artificial Sequence: Synthetic Chimeric Antigen Receptor sequence"
QVQLQQPGAELVKPGTSVKLSCKASGYNFTNYWINWVKLRPGQGLEWIGEIYPGSGSTNYNEKFKSKATLTADTSSSTAYMQLSSLASEDSALYYCARDGNYYAMDYWGQGTSVTVSSGGGGSGGGGSGGGGSDIQMTQTTSSLSASLGDRVTITCRASQDINNYLNWYQQKPDGTVKLLIYYTSALHSGVPSRFSGSGSGTDYSLTISNLEQEDIATYFCQQGNTLPPYTFGGGTKLEIKGLAVSTISSFFPPGYQIYIWAPLAGTCGVLLLSLVITLYCKRGRKKLLYIFKQPFMRPVQTTQEEDGCSCRFPEEEEGGCELRVKFSRSADAPAYQQGQNQLYNELNLGRREEYDVLDKRRGRDPEMGGKPRRKNPQEGLYNELQKDKMAEAYSEIGMKGERRRGKGHDGLYQGLSTATKDTYDALHMQALPPR

SEQ ID NO: 2431 - protein, 436 aa, Artificial Sequence
  source: /note="Description of Artificial Sequence: Synthetic Chimeric Antigen Receptor sequence"
EVKLQESGAELARPGASVKMSCKASGYTFTSYTMHWVKQRPGQGLEWIGYINPSSGYTEYNQKFKDKTTLTADKSSSTAYMQLSSLTSGDSAVYYCARRVLWLRRGDYWGQGTILTVSAGGGGSGGGGSGGGGSMEVLITQTPSSLSASLGERVSLTCRASQDIGSSLNWLQQEPDGTIKRLIYATSSLDSGVPKRFSGSRSGSDYSLTISSLESEDFVDYYCLQYASSPYTFGGGTKLELKGLAVSTISSFFPPGYQIYIWAPLAGTCGVLLLSLVITLYCKRGRKKLLYIFKQPFMRPVQTTQEEDGCSCRFPEEEEGGCELRVKFSRSADAPAYQQGQNQLYNELNLGRREEYDVLDKRRGRDPEMGGKPRRKNPQEGLYNELQKDKMAEAYSEIGMKGERRRGKGHDGLYQGLSTATKDTYDALHMQALPPR

SEQ ID NO: 2432 - protein, 437 aa, Artificial Sequence
  source: /note="Description of Artificial Sequence: Synthetic Chimeric Antigen Receptor sequence"
EVKLVESGGGLVKPGGSLKLSCAASGFTFSSYAMSWVRQTPEKRLEWVASISTGASAYFPDSVKGRFTISRDNARNILYLQMSSLRSEDTAMYYCARITTSTWYFDVWGAGTTVTVSSGGGGSGGGGSGGGGSDIKMTQSPSSMYASLGERVTITCKASQDINSYLSWFQQKPGKSPKTLIYRANRLVDGVPSRFSGSGSGQDYSLTISSLEYEDMGIYYCLQYDEFPYTFGGGTKLEIKGLAVSTISSFFPPGYQIISFFLALTSTALLFLLFFLTLRFSVVKRGRKKLLYIFKQPFMRPVQTTQEEDGCSCRFPEEEEGGCELRVKFSRSADAPAYQQGQNQLYNELNLGRREEYDVLDKRRGRDPEMGGKPRRKNPQEGLYNELQKDKMAEAYSEIGMKGERRRGKGHDGLYQGLSTATKDTYDALHMQALPPR

SEQ ID NO: 2433 - protein, 437 aa, Artificial Sequence
  source: /note="Description of Artificial Sequence: Synthetic Chimeric Antigen Receptor sequence"
QVQLQQSGAELVRPGASVTLSCKASGYTFSDYEMHWVIQTPVHGLEWIGAIDPETGGTAYNQKFKGKAILTADKSSSTAYMELRSLTSEDSAVYYCTGYYDYDSFTYWGQGTLVTVSAGGGGSGGGGSGGGGSDIVMTQSQKIMSTTVGDRVSITCKASQNVDAAVAWYQQKPGQSPKLLIYSASNRYTGVPDRFTGSGSGTDFTLTISNMQSEDLADYFCQQYDIYPYTFGGGTKLEIKGLAVSTISSFFPPGYQIISFFLALTSTALLFLLFFLTLRFSVVKRGRKKLLYIFKQPFMRPVQTTQEEDGCSCRFPEEEEGGCELRVKFSRSADAPAYQQGQNQLYNELNLGRREEYDVLDKRRGRDPEMGGKPRRKNPQEGLYNELQKDKMAEAYSEIGMKGERRRGKGHDGLYQGLSTATKDTYDALHMQALPPR

SEQ ID NO: 2434 - protein, 438 aa, Artificial Sequence
  source: /note="Description of Artificial Sequence: Synthetic Chimeric Antigen Receptor sequence"
EVKLVESGGGLVKPGGSLKLSCAASGFTFSSYAMSWVRQIPEKRLEWVASISRGGTTYYPDSVKGRFTISRDNVRNILYLQMSSLRSEDTAMYYCGRYDYDGYYAMDYWGQGTSVTVSSGGGGSGGGGSGGGGSDIKMTQSPSSMYASLGERVTITCKASPDINSYLSWFQQKPGKSPKTLIYRANRLVDGVPSRFSGGGSGQDYSLTINSLEYEDMGIYYCLQYDEFPYTFGGGTKLEMKGLAVSTISSFFPPGYQIISFFLALTSTALLFLLFFLTLRFSVVKRGRKKLLYIFKQPFMRPVQTTQEEDGCSCRFPEEEEGGCELRVKFSRSADAPAYQQGQNQLYNELNLGRREEYDVLDKRRGRDPEMGGKPRRKNPQEGLYNELQKDKMAEAYSEIGMKGERRRGKGHDGLYQGLSTATKDTYDALHMQALPPR

SEQ ID NO: 2435 - protein, 438 aa, Artificial Sequence
  source: /note="Description of Artificial Sequence: Synthetic Chimeric Antigen Receptor sequence"
EVQLQQSGPELEKPGASVKISCKASGFAFTGYNMNWVKQTNGKSLEWIGSIDPYYGGSTYNQKFKDKATLTVDKSSSTAYMQLKSLTSDDSAVYYCARSPGGDYAMDYWGQGTSVTVSSGGGGSGGGGSGGGGSDIKMTQSPSSMYASVGERVTITCKASQGINSYSGWFQQKPGKSPKTLIYRGNRLVDGVPSRFSGSGSGQDYSLTISSLEYEDMGIYYCLQYDEFPYTFGGGTKLEIKGLAVSTISSFFPPGYQIISFFLALTSTALLFLLFFLTLRFSVVKRGRKKLLYIFKQPFMRPVQTTQEEDGCSCRFPEEEEGGCELRVKFSRSADAPAYQQGQNQLYNELNLGRREEYDVLDKRRGRDPEMGGKPRRKNPQEGLYNELQKDKMAEAYSEIGMKGERRRGKGHDGLYQGLSTATKDTYDALHMQALPPR

SEQ ID NO: 2436 - protein, 438 aa, Artificial Sequence
  source: /note="Description of Artificial Sequence: Synthetic Chimeric Antigen Receptor sequence"
QVQLQQPGAELVKPGTSVKLSCKASGYNFTNYWINWVKLRPGQGLEWIGEIYPGSGSTNYNEKFKSKATLTADTSSSTAYMQLSSLASEDSALYYCARDGNYYAMDYWGQGTSVTVSSGGGGSGGGGSGGGGSDIQMTQTTSSLSASLGDRVTITCRASQDINNYLNWYQQKPDGTVKLLIYYTSALHSGVPSRFSGSGSGTDYSLTISNLEQEDIATYFCQQGNTLPPYTFGGGTKLEIKGLAVSTISSFFPPGYQIISFFLALTSTALLFLLFFLTLRFSVVKRGRKKLLYIFKQPFMRPVQTTQEEDGCSCRFPEEEEGGCELRVKFSRSADAPAYQQGQNQLYNELNLGRREEYDVLDKRRGRDPEMGGKPRRKNPQEGLYNELQKDKMAEAYSEIGMKGERRRGKGHDGLYQGLSTATKDTYDALHMQALPPR

SEQ ID NO: 2437 - protein, 439 aa, Artificial Sequence
  source: /note="Description of Artificial Sequence: Synthetic Chimeric Antigen Receptor sequence"
EVKLQESGAELARPGASVKMSCKASGYTFTSYTMHWVKQRPGQGLEWIGYINPSSGYTEYNQKFKDKTTLTADKSSSTAYMQLSSLTSGDSAVYYCARRVLWLRRGDYWGQGTILTVSAGGGGSGGGGSGGGGSMEVLITQTPSSLSASLGERVSLTCRASQDIGSSLNWLQQEPDGTIKRLIYATSSLDSGVPKRFSGSRSGSDYSLTISSLESEDFVDYYCLQYASSPYTFGGGTKLELKGLAVSTISSFFPPGYQIISFFLALTSTALLFLLFFLTLRFSVVKRGRKKLLYIFKQPFMRPVQTTQEEDGCSCRFPEEEEGGCELRVKFSRSADAPAYQQGQNQLYNELNLGRREEYDVLDKRRGRDPEMGGKPRRKNPQEGLYNELQKDKMAEAYSEIGMKGERRRGKGHDGLYQGLSTATKDTYDALHMQALPPR

SEQ ID NO: 2438 - protein, 454 aa, Artificial Sequence
  source: /note="Description of Artificial Sequence: Synthetic Chimeric Antigen Receptor sequence"
MALPVTALLLPLALLLHAARPQVQLQESGPGLVKPSETLSLTCTVSGFSLTSYGYVHWVRQPPGKGLEWLGVIWAGGFTNYNPSLKSRLTISKDNSKNQVSLKLSSVTAADTAVYYCARRGSSYSMDYWGQGTLVTVSSGGGGSGGGGSGGGGSEIVLTQSPATLSLSPGERATLSCRASSNVSYIHWYQQKPGQAPRPWIYEISKLATGIPARFSGSGSGTDYTLTISSLEPEDFAVYYCQQWNYPLITFGQGTKLEIKGLAVSTISSFFPPGYQIYIWAPLAGTCGVLLLSLVITLYCKRGRKKLLYIFKQPFMRPVQTTQEEDGCSCRFPEEEEGGCELRVKFSRSADAPAYQQGQNQLYNELNLGRREEYDVLDKRRGRDPEMGGKPRRKNPQEGLYNELQKDKMAEAYSEIGMKGERRRGKGHDGLYQGLSTATKDTYDALHMQALPPR

SEQ ID NO: 2439 - protein, 455 aa, Artificial Sequence
  source: /note="Description of Artificial Sequence: Synthetic Chimeric Antigen Receptor sequence"
MALPVTALLLPLALLLHAARPEVQLVESGGGLVKPGGSLRLSCAASGFTFSSYAMSWVRQAPGKGLEWVASISTGASAYFADSVKGRFTISRDNAKNSLYLQMNSLRAEDTAVYYCARITTSTWYFDVWGQGTTVTVSSGGGGSGGGGSGGGGSDIQMTQSPSSLSASVGDRVTITCRASQDINSYLSWFQQKPGKAPKTLIYRANRLQSGVPSRFSGSGSGQDYTLTISSLQPEDFATYYCLQYDEFPYTFGQGTKLEIKGLAVSTISSFFPPGYQIYIWAPLAGTCGVLLLSLVITLYCKRGRKKLLYIFKQPFMRPVQTTQEEDGCSCRFPEEEEGGCELRVKFSRSADAPAYQQGQNQLYNELNLGRREEYDVLDKRRGRDPEMGGKPRRKNPQEGLYNELQKDKMAEAYSEIGMKGERRRGKGHDGLYQGLSTATKDTYDALHMQALPPR

SEQ ID NO: 2440 - protein, 457 aa, Artificial Sequence
  source: /note="Description of Artificial Sequence: Synthetic Chimeric Antigen Receptor sequence"
MALPVTALLLPLALLLHAARPQVQLQESGPGLVKPSETLSLTCTVSGFSLTSYGYVHWVRQPPGKGLEWLGVIWAGGFTNYNPSLKSRLTISKDNSKNQVSLKLSSVTAADTAVYYCARRGSSYSMDYWGQGTLVTVSSGGGGSGGGGSGGGGSEIVLTQSPATLSLSPGERATLSCRASSNVSYIHWYQQKPGQAPRPWIYEISKLATGIPARFSGSGSGTDYTLTISSLEPEDFAVYYCQQWNYPLITFGQGTKLEIKGLAVSTISSFFPPGYQIISFFLALTSTALLFLLFFLTLRFSVVKRGRKKLLYIFKQPFMRPVQTTQEEDGCSCRFPEEEEGGCELRVKFSRSADAPAYQQGQNQLYNELNLGRREEYDVLDKRRGRDPEMGGKPRRKNPQEGLYNELQKDKMAEAYSEIGMKGERRRGKGHDGLYQGLSTATKDTYDALHMQALPPR

SEQ ID NO: 2441 - protein, 458 aa, Artificial Sequence
  source: /note="Description of Artificial Sequence: Synthetic Chimeric Antigen Receptor sequence"
MALPVTALLLPLALLLHAARPEVQLVESGGGLVKPGGSLRLSCAASGFTFSSYAMSWVRQAPGKGLEWVASISTGASAYFADSVKGRFTISRDNAKNSLYLQMNSLRAEDTAVYYCARITTSTWYFDVWGQGTTVTVSSGGGGSGGGGSGGGGSDIQMTQSPSSLSASVGDRVTITCRASQDINSYLSWFQQKPGKAPKTLIYRANRLQSGVPSRFSGSGSGQDYTLTISSLQPEDFATYYCLQYDEFPYTFGQGTKLEIKGLAVSTISSFFPPGYQIISFFLALTSTALLFLLFFLTLRFSVVKRGRKKLLYIFKQPFMRPVQTTQEEDGCSCRFPEEEEGGCELRVKFSRSADAPAYQQGQNQLYNELNLGRREEYDVLDKRRGRDPEMGGKPRRKNPQEGLYNELQKDKMAEAYSEIGMKGERRRGKGHDGLYQGLSTATKDTYDALHMQALPPR

SEQ ID NO: 2442 - protein, 459 aa, Artificial Sequence
  source: /note="Description of Artificial Sequence: Synthetic Chimeric Antigen Receptor sequence"
EVKLQQSGPELVKPGASVKISCKTSGYTFTEYTMHWVKQSHGKSLEWIGGINPNNGGTSYNQKFKGKATLTVDKSSSTAYMELRSLTSEDSAVYYCALQGFAYWGQGTPLTVSSGGGGSGGGGSGGGGSMEIEITQTPALMSASPGEKVTMTCSASSSVSYMYWYQQKPRSSPKPWIYLTSNLASGVPARFSGSGSGTSYSLTISSMEAEDAATYYCQQWSSNPYTFGGGTRLELKTTTPAPRPPTPAPTIASQPLSLRPEACRPAAGGAVHTRGLDFACDIYIWAPLAGTCGVLLLSLVITLYCKRGRKKLLYIFKQPFMRPVQTTQEEDGCSCRFPEEEEGGCELRVKFSRSADAPAYQQGQNQLYNELNLGRREEYDVLDKRRGRDPEMGGKPRRKNPQEGLYNELQKDKMAEAYSEIGMKGERRRGKGHDGLYQGLSTATKDTYDALHMQALPPR

SEQ ID NO: 2443 - protein, 461 aa, Artificial Sequence
  source: /note="Description of Artificial Sequence: Synthetic Chimeric Antigen Receptor sequence"
QVQLKESGPGLVAPSQTLSITCTVSGFSLTSYGVHWVRQPPGKGLEWLGVIWAGGFTNYNSALKSRLSISKDNSKSQVLLKMTSLQTDDTAMYYCARRGSSYSMDYWGQGTSVTVSSGGGGSGGGGSGGGGSEIVLSQSPAITAASLGQKVTITCSASSNVSYIHWYQQRSGTSPRPWIYEISKLASGVPVRFSGSGSGTSYSLTISSMEAEDAAIYYCQQWNYPLITFGSGTKLEIQTTTPAPRPPTPAPTIASQPLSLRPEACRPAAGGAVHTRGLDFACDIYIWAPLAGTCGVLLLSLVITLYCKRGRKKLLYIFKQPFMRPVQTTQEEDGCSCRFPEEEEGGCELRVKFSRSADAPAYQQGQNQLYNELNLGRREEYDVLDKRRGRDPEMGGKPRRKNPQEGLYNELQKDKMAEAYSEIGMKGERRRGKGHDGLYQGLSTATKDTYDALHMQALPPR

SEQ ID NO: 2444 - protein, 462 aa, Artificial Sequence
  source: /note="Description of Artificial Sequence: Synthetic Chimeric Antigen Receptor sequence"
EVKLQQSGPELVKPGASVKISCKTSGYTFTEYTMHWVKQSHGKSLEWIGGINPNNGGTSYNQKFKGKATLTVDKSSSTAYMELRSLTSEDSAVYYCALQGFAYWGQGTPLTVSSGGGGSGGGGSGGGGSMEIEITQTPALMSASPGEKVTMTCSASSSVSYMYWYQQKPRSSPKPWIYLTSNLASGVPARFSGSGSGTSYSLTISSMEAEDAATYYCQQWSSNPYTFGGGTRLELKTTTPAPRPPTPAPTIASQPLSLRPEACRPAAGGAVHTRGLDFACDIISFFLALTSTALLFLLFFLTLRFSVVKRGRKKLLYIFKQPFMRPVQTTQEEDGCSCRFPEEEEGGCELRVKFSRSADAPAYQQGQNQLYNELNLGRREEYDVLDKRRGRDPEMGGKPRRKNPQEGLYNELQKDKMAEAYSEIGMKGERRRGKGHDGLYQGLSTATKDTYDALHMQALPPR

SEQ ID NO: 2445 - protein, 463 aa, Artificial Sequence
  source: /note="Description of Artificial Sequence: Synthetic Chimeric Antigen Receptor sequence"
EVKLVESGGGLVKPGGSLKLSCAASGFTFSSYAMSWVRQTPEKRLEWVASISTGASAYFPDSVKGRFTISRDNARNILYLQMSSLRSEDTAMYYCARITTSTWYFDVWGAGTTVTVSSGGGGSGGGGSGGGGSDIKMTQSPSSMYASLGERVTITCKASQDINSYLSWFQQKPGKSPKTLIYRANRLVDGVPSRFSGSGSGQDYSLTISSLEYEDMGIYYCLQYDEFPYTFGGGTKLEIKTTTPAPRPPTPAPTIASQPLSLRPEACRPAAGGAVHTRGLDFACDIYIWAPLAGTCGVLLLSLVITLYCKRGRKKLLYIFKQPFMRPVQTTQEEDGCSCRFPEEEEGGCELRVKFSRSADAPAYQQGQNQLYNELNLGRREEYDVLDKRRGRDPEMGGKPRRKNPQEGLYNELQKDKMAEAYSEIGMKGERRRGKGHDGLYQGLSTATKDTYDALHMQALPPR

SEQ ID NO: 2446 - protein, 463 aa, Artificial Sequence
  source: /note="Description of Artificial Sequence: Synthetic Chimeric Antigen Receptor sequence"
QVQLQQSGAELVRPGASVTLSCKASGYTFSDYEMHWVIQTPVHGLEWIGAIDPETGGTAYNQKFKGKAILTADKSSSTAYMELRSLTSEDSAVYYCTGYYDYDSFTYWGQGTLVTVSAGGGGSGGGGSGGGGSDIVMTQSQKIMSTTVGDRVSITCKASQNVDAAVAWYQQKPGQSPKLLIYSASNRYTGVPDRFTGSGSGTDFTLTISNMQSEDLADYFCQQYDIYPYTFGGGTKLEIKTTTPAPRPPTPAPTIASQPLSLRPEACRPAAGGAVHTRGLDFACDIYIWAPLAGTCGVLLLSLVITLYCKRGRKKLLYIFKQPFMRPVQTTQEEDGCSCRFPEEEEGGCELRVKFSRSADAPAYQQGQNQLYNELNLGRREEYDVLDKRRGRDPEMGGKPRRKNPQEGLYNELQKDKMAEAYSEIGMKGERRRGKGHDGLYQGLSTATKDTYDALHMQALPPR

SEQ ID NO: 2447 - protein, 464 aa, Artificial Sequence
  source: /note="Description of Artificial Sequence: Synthetic Chimeric Antigen Receptor sequence"
EVKLVESGGGLVKPGGSLKLSCAASGFTFSSYAMSWVRQIPEKRLEWVASISRGGTTYYPDSVKGRFTISRDNVRNILYLQMSSLRSEDTAMYYCGRYDYDGYYAMDYWGQGTSVTVSSGGGGSGGGGSGGGGSDIKMTQSPSSMYASLGERVTITCKASPDINSYLSWFQQKPGKSPKTLIYRANRLVDGVPSRFSGGGSGQDYSLTINSLEYEDMGIYYCLQYDEFPYTFGGGTKLEMKTTTPAPRPPTPAPTIASQPLSLRPEACRPAAGGAVHTRGLDFACDIYIWAPLAGTCGVLLLSLVITLYCKRGRKKLLYIFKQPFMRPVQTTQEEDGCSCRFPEEEEGGCELRVKFSRSADAPAYQQGQNQLYNELNLGRREEYDVLDKRRGRDPEMGGKPRRKNPQEGLYNELQKDKMAEAYSEIGMKGERRRGKGHDGLYQGLSTATKDTYDALHMQALPPR

SEQ ID NO: 2448 - protein, 464 aa, Artificial Sequence
  source: /note="Description of Artificial Sequence: Synthetic Chimeric Antigen Receptor sequence"
EVQLQQSGPELEKPGASVKISCKASGFAFTGYNMNWVKQTNGKSLEWIGSIDPYYGGSTYNQKFKDKATLTVDKSSSTAYMQLKSLTSDDSAVYYCARSPGGDYAMDYWGQGTSVTVSSGGGGSGGGGSGGGGSDIKMTQSPSSMYASVGERVTITCKASQGINSYSGWFQQKPGKSPKTLIYRGNRLVDGVPSRFSGSGSGQDYSLTISSLEYEDMGIYYCLQYDEFPYTFGGGTKLEIKTTTPAPRPPTPAPTIASQPLSLRPEACRPAAGGAVHTRGLDFACDIYIWAPLAGTCGVLLLSLVITLYCKRGRKKLLYIFKQPFMRPVQTTQEEDGCSCRFPEEEEGGCELRVKFSRSADAPAYQQGQNQLYNELNLGRREEYDVLDKRRGRDPEMGGKPRRKNPQEGLYNELQKDKMAEAYSEIGMKGERRRGKGHDGLYQGLSTATKDTYDALHMQALPPR

SEQ ID NO: 2449 - protein, 464 aa, Artificial Sequence
  source: /note="Description of Artificial Sequence: Synthetic Chimeric Antigen Receptor sequence"
QVQLKESGPGLVAPSQTLSITCTVSGFSLTSYGVHWVRQPPGKGLEWLGVIWAGGFTNYNSALKSRLSISKDNSKSQVLLKMTSLQTDDTAMYYCARRGSSYSMDYWGQGTSVTVSSGGGGSGGGGSGGGGSEIVLSQSPAITAASLGQKVTITCSASSNVSYIHWYQQRSGTSPRPWIYEISKLASGVPVRFSGSGSGTSYSLTISSMEAEDAAIYYCQQWNYPLITFGSGTKLEIQTTTPAPRPPTPAPTIASQPLSLRPEACRPAAGGAVHTRGLDFACDIISFFLALTSTALLFLLFFLTLRFSVVKRGRKKLLYIFKQPFMRPVQTTQEEDGCSCRFPEEEEGGCELRVKFSRSADAPAYQQGQNQLYNELNLGRREEYDVLDKRRGRDPEMGGKPRRKNPQEGLYNELQKDKMAEAYSEIGMKGERRRGKGHDGLYQGLSTATKDTYDALHMQALPPR

SEQ ID NO: 2450 - protein, 464 aa, Artificial Sequence
  source: /note="Description of Artificial Sequence: Synthetic Chimeric Antigen Receptor sequence"
QVQLQQPGAELVKPGTSVKLSCKASGYNFTNYWINWVKLRPGQGLEWIGEIYPGSGSTNYNEKFKSKATLTADTSSSTAYMQLSSLASEDSALYYCARDGNYYAMDYWGQGTSVTVSSGGGGSGGGGSGGGGSDIQMTQTTSSLSASLGDRVTITCRASQDINNYLNWYQQKPDGTVKLLIYYTSALHSGVPSRFSGSGSGTDYSLTISNLEQEDIATYFCQQGNTLPPYTFGGGTKLEIKTTTPAPRPPTPAPTIASQPLSLRPEACRPAAGGAVHTRGLDFACDIYIWAPLAGTCGVLLLSLVITLYCKRGRKKLLYIFKQPFMRPVQTTQEEDGCSCRFPEEEEGGCELRVKFSRSADAPAYQQGQNQLYNELNLGRREEYDVLDKRRGRDPEMGGKPRRKNPQEGLYNELQKDKMAEAYSEIGMKGERRRGKGHDGLYQGLSTATKDTYDALHMQALPPR

SEQ ID NO: 2451 - protein, 466 aa, Artificial Sequence
  source: /note="Description of Artificial Sequence: Synthetic Chimeric Antigen Receptor sequence"
EVKLVESGGGLVKPGGSLKLSCAASGFTFSSYAMSWVRQTPEKRLEWVASISTGASAYFPDSVKGRFTISRDNARNILYLQMSSLRSEDTAMYYCARITTSTWYFDVWGAGTTVTVSSGGGGSGGGGSGGGGSDIKMTQSPSSMYASLGERVTITCKASQDINSYLSWFQQKPGKSPKTLIYRANRLVDGVPSRFSGSGSGQDYSLTISSLEYEDMGIYYCLQYDEFPYTFGGGTKLEIKTTTPAPRPPTPAPTIASQPLSLRPEACRPAAGGAVHTRGLDFACDIISFFLALTSTALLFLLFFLTLRFSVVKRGRKKLLYIFKQPFMRPVQTTQEEDGCSCRFPEEEEGGCELRVKFSRSADAPAYQQGQNQLYNELNLGRREEYDVLDKRRGRDPEMGGKPRRKNPQEGLYNELQKDKMAEAYSEIGMKGERRRGKGHDGLYQGLSTATKDTYDALHMQALPPR

SEQ ID NO: 2452 - protein, 466 aa, Artificial Sequence
  source: /note="Description of Artificial Sequence: Synthetic Chimeric Antigen Receptor sequence"
QVQLQQSGAELVRPGASVTLSCKASGYTFSDYEMHWVIQTPVHGLEWIGAIDPETGGTAYNQKFKGKAILTADKSSSTAYMELRSLTSEDSAVYYCTGYYDYDSFTYWGQGTLVTVSAGGGGSGGGGSGGGGSDIVMTQSQKIMSTTVGDRVSITCKASQNVDAAVAWYQQKPGQSPKLLIYSASNRYTGVPDRFTGSGSGTDFTLTISNMQSEDLADYFCQQYDIYPYTFGGGTKLEIKTTTPAPRPPTPAPTIASQPLSLRPEACRPAAGGAVHTRGLDFACDIISFFLALTSTALLFLLFFLTLRFSVVKRGRKKLLYIFKQPFMRPVQTTQEEDGCSCRFPEEEEGGCELRVKFSRSADAPAYQQGQNQLYNELNLGRREEYDVLDKRRGRDPEMGGKPRRKNPQEGLYNELQKDKMAEAYSEIGMKGERRRGKGHDGLYQGLSTATKDTYDALHMQALPPR

SEQ ID NO: 2453 - protein, 467 aa, Artificial Sequence
  source: /note="Description of Artificial Sequence: Synthetic Chimeric Antigen Receptor sequence"
EVKLVESGGGLVKPGGSLKLSCAASGFTFSSYAMSWVRQIPEKRLEWVASISRGGTTYYPDSVKGRFTISRDNVRNILYLQMSSLRSEDTAMYYCGRYDYDGYYAMDYWGQGTSVTVSSGGGGSGGGGSGGGGSDIKMTQSPSSMYASLGERVTITCKASPDINSYLSWFQQKPGKSPKTLIYRANRLVDGVPSRFSGGGSGQDYSLTINSLEYEDMGIYYCLQYDEFPYTFGGGTKLEMKTTTPAPRPPTPAPTIASQPLSLRPEACRPAAGGAVHTRGLDFACDIISFFLALTSTALLFLLFFLTLRFSVVKRGRKKLLYIFKQPFMRPVQTTQEEDGCSCRFPEEEEGGCELRVKFSRSADAPAYQQGQNQLYNELNLGRREEYDVLDKRRGRDPEMGGKPRRKNPQEGLYNELQKDKMAEAYSEIGMKGERRRGKGHDGLYQGLSTATKDTYDALHMQALPPR

SEQ ID NO: 2454 - protein, 467 aa, Artificial Sequence
  source: /note="Description of Artificial Sequence: Synthetic Chimeric Antigen Receptor sequence"
EVQLQQSGPELEKPGASVKISCKASGFAFTGYNMNWVKQTNGKSLEWIGSIDPYYGGSTYNQKFKDKATLTVDKSSSTAYMQLKSLTSDDSAVYYCARSPGGDYAMDYWGQGTSVTVSSGGGGSGGGGSGGGGSDIKMTQSPSSMYASVGERVTITCKASQGINSYSGWFQQKPGKSPKTLIYRGNRLVDGVPSRFSGSGSGQDYSLTISSLEYEDMGIYYCLQYDEFPYTFGGGTKLEIKTTTPAPRPPTPAPTIASQPLSLRPEACRPAAGGAVHTRGLDFACDIISFFLALTSTALLFLLFFLTLRFSVVKRGRKKLLYIFKQPFMRPVQTTQEEDGCSCRFPEEEEGGCELRVKFSRSADAPAYQQGQNQLYNELNLGRREEYDVLDKRRGRDPEMGGKPRRKNPQEGLYNELQKDKMAEAYSEIGMKGERRRGKGHDGLYQGLSTATKDTYDALHMQALPPR

SEQ ID NO: 2455 - protein, 467 aa, Artificial Sequence
  source: /note="Description of Artificial Sequence: Synthetic Chimeric Antigen Receptor sequence"
QVQLQQPGAELVKPGTSVKLSCKASGYNFTNYWINWVKLRPGQGLEWIGEIYPGSGSTNYNEKFKSKATLTADTSSSTAYMQLSSLASEDSALYYCARDGNYYAMDYWGQGTSVTVSSGGGGSGGGGSGGGGSDIQMTQTTSSLSASLGDRVTITCRASQDINNYLNWYQQKPDGTVKLLIYYTSALHSGVPSRFSGSGSGTDYSLTISNLEQEDIATYFCQQGNTLPPYTFGGGTKLEIKTTTPAPRPPTPAPTIASQPLSLRPEACRPAAGGAVHTRGLDFACDIISFFLALTSTALLFLLFFLTLRFSVVKRGRKKLLYIFKQPFMRPVQTTQEEDGCSCRFPEEEEGGCELRVKFSRSADAPAYQQGQNQLYNELNLGRREEYDVLDKRRGRDPEMGGKPRRKNPQEGLYNELQKDKMAEAYSEIGMKGERRRGKGHDGLYQGLSTATKDTYDALHMQALPPR

SEQ ID NO: 2456 - protein, 468 aa, Artificial Sequence
  source: /note="Description of Artificial Sequence: Synthetic Chimeric Antigen Receptor sequence"
EVKLQESGAELARPGASVKMSCKASGYTFTSYTMHWVKQRPGQGLEWIGYINPSSGYTEYNQKFKDKTTLTADKSSSTAYMQLSSLTSGDSAVYYCARRVLWLRRGDYWGQGTILTVSAGGGGSGGGGSGGGGSMEVLITQTPSSLSASLGERVSLTCRASQDIGSSLNWLQQEPDGTIKRLIYATSSLDSGVPKRFSGSRSGSDYSLTISSLESEDFVDYYCLQYASSPYTFGGGTKLELKTTTPAPRPPTPAPTIASQPLSLRPEACRPAAGGAVHTRGLDFACDIISFFLALTSTALLFLLFFLTLRFSVVKRGRKKLLYIFKQPFMRPVQTTQEEDGCSCRFPEEEEGGCELRVKFSRSADAPAYQQGQNQLYNELNLGRREEYDVLDKRRGRDPEMGGKPRRKNPQEGLYNELQKDKMAEAYSEIGMKGERRRGKGHDGLYQGLSTATKDTYDALHMQALPPR

SEQ ID NO: 2457 - protein, 483 aa, Artificial Sequence
  source: /note="Description of Artificial Sequence: Synthetic Chimeric Antigen Receptor sequence"
MALPVTALLLPLALLLHAARPEIVLTQSPGTLSLSPGERATLSCRASQSVSSSYLAWYQQKPGQAPRLLIYGASSRATGIPDRFSGSGSGTDFTLTISRLEPEDFAVYYCQQYGSSFGPGTKVDIKRGGGGSGGGGSGGGGSQVQLVQSGTEVKKPGSSVKVSCQASGGSLSSHGVSWLRQAPGQGLEWVGRIIPMFGVTDYAQKFQDRVTITADKSTSTVYMELISLGSDDTAVYFCARESRGATFEYWGQGTLVTVSSTTTPAPRPPTPAPTIASQPLSLRPEACRPAAGGAVHTRGLDFACDIYIWAPLAGTCGVLLLSLVITLYCKRGRKKLLYIFKQPFMRPVQTTQEEDGCSCRFPEEEEGGCELRVKFSRSADAPAYQQGQNQLYNELNLGRREEYDVLDKRRGRDPEMGGKPRRKNPQEGLYNELQKDKMAEAYSEIGMKGERRRGKGHDGLYQGLSTATKDTYDALHMQALPPR

SEQ ID NO: 2458 - protein, 483 aa, Artificial Sequence
  source: /note="Description of Artificial Sequence: Synthetic Chimeric Antigen Receptor sequence"
MALPVTALLLPLALLLHAARPQVQLQESGPGLVKPSETLSLTCTVSGFSLTSYGYVHWVRQPPGKGLEWLGVIWAGGFTNYNPSLKSRLTISKDNSKNQVSLKLSSVTAADTAVYYCARRGSSYSMDYWGQGTLVTVSSGGGGSGGGGSGGGGSEIVLTQSPATLSLSPGERATLSCRASSNVSYIHWYQQKPGQAPRPWIYEISKLATGIPARFSGSGSGTDYTLTISSLEPEDFAVYYCQQWNYPLITFGQGTKLEIKTTTPAPRPPTPAPTIASQPLSLRPEACRPAAGGAVHTRGLDFACDIYIWAPLAGTCGVLLLSLVITLYCKRGRKKLLYIFKQPFMRPVQTTQEEDGCSCRFPEEEEGGCELRVKFSRSADAPAYQQGQNQLYNELNLGRREEYDVLDKRRGRDPEMGGKPRRKNPQEGLYNELQKDKMAEAYSEIGMKGERRRGKGHDGLYQGLSTATKDTYDALHMQALPPR

SEQ ID NO: 2459 - protein, 484 aa, Artificial Sequence
  source: /note="Description of Artificial Sequence: Synthetic Chimeric Antigen Receptor sequence"
MALPVTALLLPLALLLHAARPEVQLVESGGGLVKPGGSLRLSCAASGFTFSSYAMSWVRQAPGKGLEWVASISTGASAYFADSVKGRFTISRDNAKNSLYLQMNSLRAEDTAVYYCARITTSTWYFDVWGQGTTVTVSSGGGGSGGGGSGGGGSDIQMTQSPSSLSASVGDRVTITCRASQDINSYLSWFQQKPGKAPKTLIYRANRLQSGVPSRFSGSGSGQDYTLTISSLQPEDFATYYCLQYDEFPYTFGQGTKLEIKTTTPAPRPPTPAPTIASQPLSLRPEACRPAAGGAVHTRGLDFACDIYIWAPLAGTCGVLLLSLVITLYCKRGRKKLLYIFKQPFMRPVQTTQEEDGCSCRFPEEEEGGCELRVKFSRSADAPAYQQGQNQLYNELNLGRREEYDVLDKRRGRDPEMGGKPRRKNPQEGLYNELQKDKMAEAYSEIGMKGERRRGKGHDGLYQGLSTATKDTYDALHMQALPPR

SEQ ID NO: 2460 - protein, 485 aa, Artificial Sequence
  source: /note="Description of Artificial Sequence: Synthetic Chimeric Antigen Receptor sequence"
MALPVTALLLPLALLLHAARPDIQMTQSPSSVSASVGDRVTITCRASQGISTLLAWYQQKPGKAPKLLISSASSLQSGVPARFSGSGSGTDFTLTISSLQPEDFATYYCQQSYRAPTFGQGTKVEIKRGGGGSGGGGSGGGGSQVTLKESGPTLLKPTQTLTLTCTFSGFSLSTRGVGVGWIRQPPGQALEWLTLIYWDDDKRYSPSLKSRLTITKDTSKNQVVLTMTNMESVDTATYYCAQQTMTGAFDIWGQGTTVTVSSTTTPAPRPPTPAPTIASQPLSLRPEACRPAAGGAVHTRGLDFACDIYIWAPLAGTCGVLLLSLVITLYCKRGRKKLLYIFKQPFMRPVQTTQEEDGCSCRFPEEEEGGCELRVKFSRSADAPAYQQGQNQLYNELNLGRREEYDVLDKRRGRDPEMGGKPRRKNPQEGLYNELQKDKMAEAYSEIGMKGERRRGKGHDGLYQGLSTATKDTYDALHMQALPPR

SEQ ID NO: 2461 - protein, 486 aa, Artificial Sequence
  source: /note="Description of Artificial Sequence: Synthetic Chimeric Antigen Receptor sequence"
MALPVTALLLPLALLLHAARPEVKLQESGAELARPGASVKMSCKASGYTFTSYTMHWVKQRPGQGLEWIGYINPSSGYTEYNQKFKDKTTLTADKSSSTAYMQLSSLTSGDSAVYYCARRVLWLRRGDYWGQGTILTVSAGGGGSGGGGSGGGGSMEVLITQTPSSLSASLGERVSLTCRASQDIGSSLNWLQQEPDGTIKRLIYATSSLDSGVPKRFSGSRSGSDYSLTISSLESEDFVDYYCLQYASSPYTFGGGTKLELKTTTPAPRPPTPAPTIASQPLSLRPEACRPAAGGAVHTRGLDFACDIYIWAPLAGTCGVLLLSLVITLYCKRGRKKLLYIFKQPFMRPVQTTQEEDGCSCRFPEEEEGGCELRVKFSRSADAPAYQQGQNQLYNELNLGRREEYDVLDKRRGRDPEMGGKPRRKNPQEGLYNELQKDKMAEAYSEIGMKGERRRGKGHDGLYQGLSTATKDTYDALHMQALPPR

SEQ ID NO: 2462 - protein, 486 aa, Artificial Sequence
  source: /note="Description of Artificial Sequence: Synthetic Chimeric Antigen Receptor sequence"
MALPVTALLLPLALLLHAARPQVQLQESGPGLVKPSETLSLTCTVSGFSLTSYGYVHWVRQPPGKGLEWLGVIWAGGFTNYNPSLKSRLTISKDNSKNQVSLKLSSVTAADTAVYYCARRGSSYSMDYWGQGTLVTVSSGGGGSGGGGSGGGGSEIVLTQSPATLSLSPGERATLSCRASSNVSYIHWYQQKPGQAPRPWIYEISKLATGIPARFSGSGSGTDYTLTISSLEPEDFAVYYCQQWNYPLITFGQGTKLEIKTTTPAPRPPTPAPTIASQPLSLRPEACRPAAGGAVHTRGLDFACDIISFFLALTSTALLFLLFFLTLRFSVVKRGRKKLLYIFKQPFMRPVQTTQEEDGCSCRFPEEEEGGCELRVKFSRSADAPAYQQGQNQLYNELNLGRREEYDVLDKRRGRDPEMGGKPRRKNPQEGLYNELQKDKMAEAYSEIGMKGERRRGKGHDGLYQGLSTATKDTYDALHMQALPPR

SEQ ID NO: 2463 - protein, 487 aa, Artificial Sequence
  source: /note="Description of Artificial Sequence: Synthetic Chimeric Antigen Receptor sequence"
MALPVTALLLPLALLLHAARPEVQLVESGGGLVKPGGSLRLSCAASGFTFSSYAMSWVRQAPGKGLEWVASISTGASAYFADSVKGRFTISRDNAKNSLYLQMNSLRAEDTAVYYCARITTSTWYFDVWGQGTTVTVSSGGGGSGGGGSGGGGSDIQMTQSPSSLSASVGDRVTITCRASQDINSYLSWFQQKPGKAPKTLIYRANRLQSGVPSRFSGSGSGQDYTLTISSLQPEDFATYYCLQYDEFPYTFGQGTKLEIKTTTPAPRPPTPAPTIASQPLSLRPEACRPAAGGAVHTRGLDFACDIISFFLALTSTALLFLLFFLTLRFSVVKRGRKKLLYIFKQPFMRPVQTTQEEDGCSCRFPEEEEGGCELRVKFSRSADAPAYQQGQNQLYNELNLGRREEYDVLDKRRGRDPEMGGKPRRKNPQEGLYNELQKDKMAEAYSEIGMKGERRRGKGHDGLYQGLSTATKDTYDALHMQALPPR

SEQ ID NO: 2464 - protein, 488 aa, Artificial Sequence
  source: /note="Description of Artificial Sequence: Synthetic Chimeric Antigen Receptor sequence"
MALPVTALLLPLALLLHAARPETTLTQSPAFMSATPGDKVNISCKASQDIDDDLNWYQQKPGEAPILIIQEATTLVPGIPPRFSGSGFGTDFTLTINSMQSEDVAYYFCLQHDNFPPTFGQGTKVEIKRGGGGSGGGGSGGGGSQVQLQESGPGLVKSSETLSLTCTVSGGSMNNYYWSWIRQPAGKGLEWMGRIYSSGSTNYNPALKSRVTMSVDTSKNQFSLNLSSVTAADTAIYYCARASWSGTYWALFDYWGQGTLVTVSSTTTPAPRPPTPAPTIASQPLSLRPEACRPAAGGAVHTRGLDFACDIYIWAPLAGTCGVLLLSLVITLYCKRGRKKLLYIFKQPFMRPVQTTQEEDGCSCRFPEEEEGGCELRVKFSRSADAPAYQQGQNQLYNELNLGRREEYDVLDKRRGRDPEMGGKPRRKNPQEGLYNELQKDKMAEAYSEIGMKGERRRGKGHDGLYQGLSTATKDTYDALHMQALPPR

SEQ ID NO: 2465 - protein, 489 aa, Artificial Sequence
  source: /note="Description of Artificial Sequence: Synthetic Chimeric Antigen Receptor sequence"
MALPVTALLLPLALLLHAARPDIQMTQSPSSLSASVGDRVTITCQASQDISNYLNWYQQKPGKAPKLLIYDASNLETGVPSRFSGSGSGTDFTFTISSLQPEDIATYYCQQYDNLPLTFGGGTKLEIKRGGGGSGGGGSGGGGSEVQLVESGGGLVKPGGSLRLSCAASGFTFSDYYMGWVRQAPGKGLKWLSYISDRAHTIYDTDSVKGRFTISRDDAKSSLYLRMNNLRVEDTAVYYCARAVGAGEGFDYWGQGTLVTVSSAAATTTPAPRPPTPAPTIASQPLSLRPEACRPAAGGAVHTRGLDFACDIYIWAPLAGTCGVLLLSLVITLYCKRGRKKLLYIFKQPFMRPVQTTQEEDGCSCRFPEEEEGGCELRVKFSRSADAPAYQQGQNQLYNELNLGRREEYDVLDKRRGRDPEMGGKPRRKNPQEGLYNELQKDKMAEAYSEIGMKGERRRGKGHDGLYQGLSTATKDTYDALHMQALPPR

SEQ ID NO: 2466 - protein, 490 aa, Artificial Sequence
  source: /note="Description of Artificial Sequence: Synthetic Chimeric Antigen Receptor sequence"
MALPVTALLLPLALLLHAARPQSALTQPASVSGSPGQSITISCTGTSSDVGGYNYVSWYQQHPGKAPKLMIYDVSKRPSGVSNRFSGSKSGNTASLTISGLQAEDEADYYCSSYTGRSTVFGGGTKLTVLGGGGGSGGGGSGGGGSEVQLVQSGGDLVQPGGSLRLSCAASGFTFSSYSMNWVRQAPGKGLEWVSSISSSSSYIYYADSVKGRFTISRDNAKNSLYLQMNSLRAEDTAVYYCARGLGGWTHDAFDIWGQGTTVTVSSTTTPAPRPPTPAPTIASQPLSLRPEACRPAAGGAVHTRGLDFACDIYIWAPLAGTCGVLLLSLVITLYCKRGRKKLLYIFKQPFMRPVQTTQEEDGCSCRFPEEEEGGCELRVKFSRSADAPAYQQGQNQLYNELNLGRREEYDVLDKRRGRDPEMGGKPRRKNPQEGLYNELQKDKMAEAYSEIGMKGERRRGKGHDGLYQGLSTATKDTYDALHMQALPPR

SEQ ID NO: 2467 - protein, 491 aa, Artificial Sequence
  source: /note="Description of Artificial Sequence: Synthetic Chimeric Antigen Receptor sequence"
MALPVTALLLPLALLLHAARPQSALTQPPSASGTPGQRVTISCPGSSSNIGSNYVYWYQQLPGTAPKLLIYRNNQRPSGVPDRFSGSKSGTSATLGITGLQTGDEADYYCGTWDSSLSAYVFGTGTKVTVLGGGGGSGGGGSGGGGSQVQLQQSGAEVKKPGASVKVSCKASGYTFSRYYIHWVRRAPGQGLEWMGLINPGGGSTNYAQKFQGRVTMTRDTSTNTVYLELSSLRSDDTAVYYCARDYGTIDARRFDFWGQGTLVTVSSTTTPAPRPPTPAPTIASQPLSLRPEACRPAAGGAVHTRGLDFACDIYIWAPLAGTCGVLLLSLVITLYCKRGRKKLLYIFKQPFMRPVQTTQEEDGCSCRFPEEEEGGCELRVKFSRSADAPAYQQGQNQLYNELNLGRREEYDVLDKRRGRDPEMGGKPRRKNPQEGLYNELQKDKMAEAYSEIGMKGERRRGKGHDGLYQGLSTATKDTYDALHMQALPPR

SEQ ID NO: 2468 - protein, 491 aa, Artificial Sequence
  source: /note="Description of Artificial Sequence: Synthetic Chimeric Antigen Receptor sequence"
MALPVTALLLPLALLLHAARPQSVLTQPPSASGTPGQRVTISCSGSSSNIGSNTVNWYQQLPGTAPKLLIYSNNQRPSGVPDRFSGSKSGTSASLAIRGLQSDDEAEYYCAAWDDSLKSFVFGKGTKVTVLGGGGGSGGGGSGGGGSQVQLVQSGAEVKKPGASVKVSCKASGYTFSRYYIHWVRQAPGQGLEWMGLINPGGGSTNYAQKFQGRVTMTRDTSTNTVYLELSSLRSDDTAVYYCARDYGTIDARRFDFWGQGTLVTVSSTTTPAPRPPTPAPTIASQPLSLRPEACRPAAGGAVHTRGLDFACDIYIWAPLAGTCGVLLLSLVITLYCKRGRKKLLYIFKQPFMRPVQTTQEEDGCSCRFPEEEEGGCELRVKFSRSADAPAYQQGQNQLYNELNLGRREEYDVLDKRRGRDPEMGGKPRRKNPQEGLYNELQKDKMAEAYSEIGMKGERRRGKGHDGLYQGLSTATKDTYDALHMQALPPR

SEQ ID NO: 2469 - protein, 492 aa, Artificial Sequence
  source: /note="Description of Artificial Sequence: Synthetic Chimeric Antigen Receptor sequence"
MALPVTALLLPLALLLHAARPQSALTQPASVSGSPGQSITISCTGTSSDFGDYDYVSWYQQHPGKAPKLMIYDVSDRPSGVSNRFSGSKSGNTASLTISGLQAEDEADYFCSSFTTSSTLVFGGGTKLTVLGGGGGSGGGGSGGGGSQVQLVQSGAEVKKPGASVKVSCKASGYTFTGYYMHWVRQAPGQGLEWMGWINPNSGGTNYAQKFQGRVTMTRDTSISTAYMELSRLRSDDTAVYYCARDGDMVYDSSGPDYWGQGTLVTVSSTTTPAPRPPTPAPTIASQPLSLRPEACRPAAGGAVHTRGLDFACDIYIWAPLAGTCGVLLLSLVITLYCKRGRKKLLYIFKQPFMRPVQTTQEEDGCSCRFPEEEEGGCELRVKFSRSADAPAYQQGQNQLYNELNLGRREEYDVLDKRRGRDPEMGGKPRRKNPQEGLYNELQKDKMAEAYSEIGMKGERRRGKGHDGLYQGLSTATKDTYDALHMQALPPR

SEQ ID NO: 2470 - protein, 494 aa, Artificial Sequence
  source: /note="Description of Artificial Sequence: Synthetic Chimeric Antigen Receptor sequence"
MALPVTALLLPLALLLHAARPQSALTQPPSASGTPGQRVTISCSGSSSNIGSNYVYWYQQLPGTAPKLLIYRNNQRPSGVPDRFSGSKSGTSASLAISGLRSEDEADYYCAAWDDSLSGYVFGTGTKVTVLGGGGGSGGGGSGGGGSQMQLVQSGAEVKKPGASVKVSCKASGYTFSRYYIHWVRQAPGQGLEWMGLINPGGGSTNYAQKFQGRVTMTRDTSTNTVYLELSSLRSDDTAVYYCARDYGTIDARRFDFWGQGTLVTVSSAAATTTPAPRPPTPAPTIASQPLSLRPEACRPAAGGAVHTRGLDFACDIYIWAPLAGTCGVLLLSLVITLYCKRGRKKLLYIFKQPFMRPVQTTQEEDGCSCRFPEEEEGGCELRVKFSRSADAPAYQQGQNQLYNELNLGRREEYDVLDKRRGRDPEMGGKPRRKNPQEGLYNELQKDKMAEAYSEIGMKGERRRGKGHDGLYQGLSTATKDTYDALHMQALPPR

SEQ ID NO: 2471 - protein, 495 aa, Artificial Sequence
  source: /note="Description of Artificial Sequence: Synthetic Chimeric Antigen Receptor sequence"
MALPVTALLLPLALLLHAARPQSALTQPALTQPASVSGSPGQSITISCTGTSSDFGDYDYVSWYQQHPGKAPKLMIYDVSDRPSGVSNRFSGSKSGNTASLTISGLQAEDEADYFCSSFTTSSTLVFGGGTKLTVLGGGGGSGGGGSGGGGSQVQLVQSGAEVKEPGASVKVSCKASGYTFRNSGITWVRQAPGQGLEWMGWINPNSGGAMYVDNFQGRATMTRDTSINTAYMELRSLSSDDTAVYYCARGMADLIDVFDIWGQGTLVTVSSTTTPAPRPPTPAPTIASQPLSLRPEACRPAAGGAVHTRGLDFACDIYIWAPLAGTCGVLLLSLVITLYCKRGRKKLLYIFKQPFMRPVQTTQEEDGCSCRFPEEEEGGCELRVKFSRSADAPAYQQGQNQLYNELNLGRREEYDVLDKRRGRDPEMGGKPRRKNPQEGLYNELQKDKMAEAYSEIGMKGERRRGKGHDGLYQGLSTATKDTYDALHMQALPPR

SEQ ID NO: 2472 - protein, 497 aa, Artificial Sequence
  source: /note="Description of Artificial Sequence: Synthetic Chimeric Antigen Receptor sequence"
MALPVTALLLPLALLLHAARPEIVMTQSPATLSVSPGERATLSCRASQSVSSNLAWYQQKPGQAPRLLIYGASTRATGIPARFSGSGSGTEFTLTISSLQSEDFAVYYCQQYNNWPPYTFGQGTKVEIKRGGGGSGGGGSGGGGSQVTLKESGPTLVKPTQTLTLTCTFSGFSLNSFGVAVGWFRQPPGKALEWLGLIYWDDDRRYFPSLEGRLSITKDASDNNVVLTMMNVDPADTATYYCARTSPMVQGIANYYAMDVWGQGTTVTVSSAAATTTPAPRPPTPAPTIASQPLSLRPEACRPAAGGAVHTRGLDFACDIYIWAPLAGTCGVLLLSLVITLYCKRGRKKLLYIFKQPFMRPVQTTQEEDGCSCRFPEEEEGGCELRVKFSRSADAPAYQQGQNQLYNELNLGRREEYDVLDKRRGRDPEMGGKPRRKNPQEGLYNELQKDKMAEAYSEIGMKGERRRGKGHDGLYQGLSTATKDTYDALHMQALPPR

SEQ ID NO: 2473 - protein, 645 aa, Artificial Sequence
  source: /note="Description of Artificial Sequence: Synthetic Chimeric Antigen Receptor sequence"
EVKLQQSGPELVKPGASVKISCKTSGYTFTEYTMHWVKQSHGKSLEWIGGINPNNGGTSYNQKFKGKATLTVDKSSSTAYMELRSLTSEDSAVYYCALQGFAYWGQGTPLTVSSGGGGSGGGGSGGGGSMEIEITQTPALMSASPGEKVTMTCSASSSVSYMYWYQQKPRSSPKPWIYLTSNLASGVPARFSGSGSGTSYSLTISSMEAEDAATYYCQQWSSNPYTFGGGTRLELKEPKSPDKTHTCPPCPAPPVAGPSVFLFPPKPKDTLMIARTPEVTCVVVDVSHEDPEVKFNWYVDGVEVHNAKTKPREEQYNSTYRVVSVLTVLHQDWLNGKEYKCKVSNKALPAPIEKTISKAKGQPREPQVYTLPPSRDELTKNQVSLTCLVKGFYPSDIAVEWESNGQPENNYKTTPPVLDSDGSFFLYSKLTVDKSRWQQGNVFSCSVMHEALHNHYTQKSLSLSPGKIYIWAPLAGTCGVLLLSLVITLYCKRGRKKLLYIFKQPFMRPVQTTQEEDGCSCRFPEEEEGGCELRVKFSRSADAPAYQQGQNQLYNELNLGRREEYDVLDKRRGRDPEMGGKPRRKNPQEGLYNELQKDKMAEAYSEIGMKGERRRGKGHDGLYQGLSTATKDTYDALHMQALPPR

SEQ ID NO: 2474 - protein, 647 aa, Artificial Sequence
  source: /note="Description of Artificial Sequence: Synthetic Chimeric Antigen Receptor sequence"
QVQLKESGPGLVAPSQTLSITCTVSGFSLTSYGVHWVRQPPGKGLEWLGVIWAGGFTNYNSALKSRLSISKDNSKSQVLLKMTSLQTDDTAMYYCARRGSSYSMDYWGQGTSVTVSSGGGGSGGGGSGGGGSEIVLSQSPAITAASLGQKVTITCSASSNVSYIHWYQQRSGTSPRPWIYEISKLASGVPVRFSGSGSGTSYSLTISSMEAEDAAIYYCQQWNYPLITFGSGTKLEIQEPKSPDKTHTCPPCPAPPVAGPSVFLFPPKPKDTLMIARTPEVTCVVVDVSHEDPEVKFNWYVDGVEVHNAKTKPREEQYNSTYRVVSVLTVLHQDWLNGKEYKCKVSNKALPAPIEKTISKAKGQPREPQVYTLPPSRDELTKNQVSLTCLVKGFYPSDIAVEWESNGQPENNYKTTPPVLDSDGSFFLYSKLTVDKSRWQQGNVFSCSVMHEALHNHYTQKSLSLSPGKIYIWAPLAGTCGVLLLSLVITLYCKRGRKKLLYIFKQPFMRPVQTTQEEDGCSCRFPEEEEGGCELRVKFSRSADAPAYQQGQNQLYNELNLGRREEYDVLDKRRGRDPEMGGKPRRKNPQEGLYNELQKDKMAEAYSEIGMKGERRRGKGHDGLYQGLSTATKDTYDALHMQALPPR

SEQ ID NO: 2475 - protein, 648 aa, Artificial Sequence
  source: /note="Description of Artificial Sequence: Synthetic Chimeric Antigen Receptor sequence"
EVKLQQSGPELVKPGASVKISCKTSGYTFTEYTMHWVKQSHGKSLEWIGGINPNNGGTSYNQKFKGKATLTVDKSSSTAYMELRSLTSEDSAVYYCALQGFAYWGQGTPLTVSSGGGGSGGGGSGGGGSMEIEITQTPALMSASPGEKVTMTCSASSSVSYMYWYQQKPRSSPKPWIYLTSNLASGVPARFSGSGSGTSYSLTISSMEAEDAATYYCQQWSSNPYTFGGGTRLELKEPKSPDKTHTCPPCPAPPVAGPSVFLFPPKPKDTLMIARTPEVTCVVVDVSHEDPEVKFNWYVDGVEVHNAKTKPREEQYNSTYRVVSVLTVLHQDWLNGKEYKCKVSNKALPAPIEKTISKAKGQPREPQVYTLPPSRDELTKNQVSLTCLVKGFYPSDIAVEWESNGQPENNYKTTPPVLDSDGSFFLYSKLTVDKSRWQQGNVFSCSVMHEALHNHYTQKSLSLSPGKIISFFLALTSTALLFLLFFLTLRFSVVKRGRKKLLYIFKQPFMRPVQTTQEEDGCSCRFPEEEEGGCELRVKFSRSADAPAYQQGQNQLYNELNLGRREEYDVLDKRRGRDPEMGGKPRRKNPQEGLYNELQKDKMAEAYSEIGMKGERRRGKGHDGLYQGLSTATKDTYDALHMQALPPR

SEQ ID NO: 2476 - protein, 649 aa, Artificial Sequence
  source: /note="Description of Artificial Sequence: Synthetic Chimeric Antigen Receptor sequence"
EVKLVESGGGLVKPGGSLKLSCAASGFTFSSYAMSWVRQTPEKRLEWVASISTGASAYFPDSVKGRFTISRDNARNILYLQMSSLRSEDTAMYYCARITTSTWYFDVWGAGTTVTVSSGGGGSGGGGSGGGGSDIKMTQSPSSMYASLGERVTITCKASQDINSYLSWFQQKPGKSPKTLIYRANRLVDGVPSRFSGSGSGQDYSLTISSLEYEDMGIYYCLQYDEFPYTFGGGTKLEIKEPKSPDKTHTCPPCPAPPVAGPSVFLFPPKPKDTLMIARTPEVTCVVVDVSHEDPEVKFNWYVDGVEVHNAKTKPREEQYNSTYRVVSVLTVLHQDWLNGKEYKCKVSNKALPAPIEKTISKAKGQPREPQVYTLPPSRDELTKNQVSLTCLVKGFYPSDIAVEWESNGQPENNYKTTPPVLDSDGSFFLYSKLTVDKSRWQQGNVFSCSVMHEALHNHYTQKSLSLSPGKIYIWAPLAGTCGVLLLSLVITLYCKRGRKKLLYIFKQPFMRPVQTTQEEDGCSCRFPEEEEGGCELRVKFSRSADAPAYQQGQNQLYNELNLGRREEYDVLDKRRGRDPEMGGKPRRKNPQEGLYNELQKDKMAEAYSEIGMKGERRRGKGHDGLYQGLSTATKDTYDALHMQALPPR

SEQ ID NO: 2477 - protein, 649 aa, Artificial Sequence
  source: /note="Description of Artificial Sequence: Synthetic Chimeric Antigen Receptor sequence"
QVQLQQSGAELVRPGASVTLSCKASGYTFSDYEMHWVIQTPVHGLEWIGAIDPETGGTAYNQKFKGKAILTADKSSSTAYMELRSLTSEDSAVYYCTGYYDYDSFTYWGQGTLVTVSAGGGGSGGGGSGGGGSDIVMTQSQKIMSTTVGDRVSITCKASQNVDAAVAWYQQKPGQSPKLLIYSASNRYTGVPDRFTGSGSGTDFTLTISNMQSEDLADYFCQQYDIYPYTFGGGTKLEIKEPKSPDKTHTCPPCPAPPVAGPSVFLFPPKPKDTLMIARTPEVTCVVVDVSHEDPEVKFNWYVDGVEVHNAKTKPREEQYNSTYRVVSVLTVLHQDWLNGKEYKCKVSNKALPAPIEKTISKAKGQPREPQVYTLPPSRDELTKNQVSLTCLVKGFYPSDIAVEWESNGQPENNYKTTPPVLDSDGSFFLYSKLTVDKSRWQQGNVFSCSVMHEALHNHYTQKSLSLSPGKIYIWAPLAGTCGVLLLSLVITLYCKRGRKKLLYIFKQPFMRPVQTTQEEDGCSCRFPEEEEGGCELRVKFSRSADAPAYQQGQNQLYNELNLGRREEYDVLDKRRGRDPEMGGKPRRKNPQEGLYNELQKDKMAEAYSEIGMKGERRRGKGHDGLYQGLSTATKDTYDALHMQALPPR

SEQ ID NO: 2478 - protein, 650 aa, Artificial Sequence
  source: /note="Description of Artificial Sequence: Synthetic Chimeric Antigen Receptor sequence"
EVKLVESGGGLVKPGGSLKLSCAASGFTFSSYAMSWVRQIPEKRLEWVASISRGGTTYYPDSVKGRFTISRDNVRNILYLQMSSLRSEDTAMYYCGRYDYDGYYAMDYWGQGTSVTVSSGGGGSGGGGSGGGGSDIKMTQSPSSMYASLGERVTITCKASPDINSYLSWFQQKPGKSPKTLIYRANRLVDGVPSRFSGGGSGQDYSLTINSLEYEDMGIYYCLQYDEFPYTFGGGTKLEMKEPKSPDKTHTCPPCPAPPVAGPSVFLFPPKPKDTLMIARTPEVTCVVVDVSHEDPEVKFNWYVDGVEVHNAKTKPREEQYNSTYRVVSVLTVLHQDWLNGKEYKCKVSNKALPAPIEKTISKAKGQPREPQVYTLPPSRDELTKNQVSLTCLVKGFYPSDIAVEWESNGQPENNYKTTPPVLDSDGSFFLYSKLTVDKSRWQQGNVFSCSVMHEALHNHYTQKSLSLSPGKIYIWAPLAGTCGVLLLSLVITLYCKRGRKKLLYIFKQPFMRPVQTTQEEDGCSCRFPEEEEGGCELRVKFSRSADAPAYQQGQNQLYNELNLGRREEYDVLDKRRGRDPEMGGKPRRKNPQEGLYNELQKDKMAEAYSEIGMKGERRRGKGHDGLYQGLSTATKDTYDALHMQALPPR

SEQ ID NO: 2479 - protein, 650 aa, Artificial Sequence
  source: /note="Description of Artificial Sequence: Synthetic Chimeric Antigen Receptor sequence"
EVQLQQSGPELEKPGASVKISCKASGFAFTGYNMNWVKQTNGKSLEWIGSIDPYYGGSTYNQKFKDKATLTVDKSSSTAYMQLKSLTSDDSAVYYCARSPGGDYAMDYWGQGTSVTVSSGGGGSGGGGSGGGGSDIKMTQSPSSMYASVGERVTITCKASQGINSYSGWFQQKPGKSPKTLIYRGNRLVDGVPSRFSGSGSGQDYSLTISSLEYEDMGIYYCLQYDEFPYTFGGGTKLEIKEPKSPDKTHTCPPCPAPPVAGPSVFLFPPKPKDTLMIARTPEVTCVVVDVSHEDPEVKFNWYVDGVEVHNAKTKPREEQYNSTYRVVSVLTVLHQDWLNGKEYKCKVSNKALPAPIEKTISKAKGQPREPQVYTLPPSRDELTKNQVSLTCLVKGFYPSDIAVEWESNGQPENNYKTTPPVLDSDGSFFLYSKLTVDKSRWQQGNVFSCSVMHEALHNHYTQKSLSLSPGKIYIWAPLAGTCGVLLLSLVITLYCKRGRKKLLYIFKQPFMRPVQTTQEEDGCSCRFPEEEEGGCELRVKFSRSADAPAYQQGQNQLYNELNLGRREEYDVLDKRRGRDPEMGGKPRRKNPQEGLYNELQKDKMAEAYSEIGMKGERRRGKGHDGLYQGLSTATKDTYDALHMQALPPR

SEQ ID NO: 2480 - protein, 650 aa, Artificial Sequence
  source: /note="Description of Artificial Sequence: Synthetic Chimeric Antigen Receptor sequence"
QVQLKESGPGLVAPSQTLSITCTVSGFSLTSYGVHWVRQPPGKGLEWLGVIWAGGFTNYNSALKSRLSISKDNSKSQVLLKMTSLQTDDTAMYYCARRGSSYSMDYWGQGTSVTVSSGGGGSGGGGSGGGGSEIVLSQSPAITAASLGQKVTITCSASSNVSYIHWYQQRSGTSPRPWIYEISKLASGVPVRFSGSGSGTSYSLTISSMEAEDAAIYYCQQWNYPLITFGSGTKLEIQEPKSPDKTHTCPPCPAPPVAGPSVFLFPPKPKDTLMIARTPEVTCVVVDVSHEDPEVKFNWYVDGVEVHNAKTKPREEQYNSTYRVVSVLTVLHQDWLNGKEYKCKVSNKALPAPIEKTISKAKGQPREPQVYTLPPSRDELTKNQVSLTCLVKGFYPSDIAVEWESNGQPENNYKTTPPVLDSDGSFFLYSKLTVDKSRWQQGNVFSCSVMHEALHNHYTQKSLSLSPGKIISFFLALTSTALLFLLFFLTLRFSVVKRGRKKLLYIFKQPFMRPVQTTQEEDGCSCRFPEEEEGGCELRVKFSRSADAPAYQQGQNQLYNELNLGRREEYDVLDKRRGRDPEMGGKPRRKNPQEGLYNELQKDKMAEAYSEIGMKGERRRGKGHDGLYQGLSTATKDTYDALHMQALPPR

SEQ ID NO: 2481 - protein, 650 aa, Artificial Sequence
  source: /note="Description of Artificial Sequence: Synthetic Chimeric Antigen Receptor sequence"
QVQLQQPGAELVKPGTSVKLSCKASGYNFTNYWINWVKLRPGQGLEWIGEIYPGSGSTNYNEKFKSKATLTADTSSSTAYMQLSSLASEDSALYYCARDGNYYAMDYWGQGTSVTVSSGGGGSGGGGSGGGGSDIQMTQTTSSLSASLGDRVTITCRASQDINNYLNWYQQKPDGTVKLLIYYTSALHSGVPSRFSGSGSGTDYSLTISNLEQEDIATYFCQQGNTLPPYTFGGGTKLEIKEPKSPDKTHTCPPCPAPPVAGPSVFLFPPKPKDTLMIARTPEVTCVVVDVSHEDPEVKFNWYVDGVEVHNAKTKPREEQYNSTYRVVSVLTVLHQDWLNGKEYKCKVSNKALPAPIEKTISKAKGQPREPQVYTLPPSRDELTKNQVSLTCLVKGFYPSDIAVEWESNGQPENNYKTTPPVLDSDGSFFLYSKLTVDKSRWQQGNVFSCSVMHEALHNHYTQKSLSLSPGKIYIWAPLAGTCGVLLLSLVITLYCKRGRKKLLYIFKQPFMRPVQTTQEEDGCSCRFPEEEEGGCELRVKFSRSADAPAYQQGQNQLYNELNLGRREEYDVLDKRRGRDPEMGGKPRRKNPQEGLYNELQKDKMAEAYSEIGMKGERRRGKGHDGLYQGLSTATKDTYDALHMQALPPR

SEQ ID NO: 2482 - protein, 651 aa, Artificial Sequence
  source: /note="Description of Artificial Sequence: Synthetic Chimeric Antigen Receptor sequence"
EVKLQESGAELARPGASVKMSCKASGYTFTSYTMHWVKQRPGQGLEWIGYINPSSGYTEYNQKFKDKTTLTADKSSSTAYMQLSSLTSGDSAVYYCARRVLWLRRGDYWGQGTILTVSAGGGGSGGGGSGGGGSMEVLITQTPSSLSASLGERVSLTCRASQDIGSSLNWLQQEPDGTIKRLIYATSSLDSGVPKRFSGSRSGSDYSLTISSLESEDFVDYYCLQYASSPYTFGGGTKLELKEPKSPDKTHTCPPCPAPPVAGPSVFLFPPKPKDTLMIARTPEVTCVVVDVSHEDPEVKFNWYVDGVEVHNAKTKPREEQYNSTYRVVSVLTVLHQDWLNGKEYKCKVSNKALPAPIEKTISKAKGQPREPQVYTLPPSRDELTKNQVSLTCLVKGFYPSDIAVEWESNGQPENNYKTTPPVLDSDGSFFLYSKLTVDKSRWQQGNVFSCSVMHEALHNHYTQKSLSLSPGKIYIWAPLAGTCGVLLLSLVITLYCKRGRKKLLYIFKQPFMRPVQTTQEEDGCSCRFPEEEEGGCELRVKFSRSADAPAYQQGQNQLYNELNLGRREEYDVLDKRRGRDPEMGGKPRRKNPQEGLYNELQKDKMAEAYSEIGMKGERRRGKGHDGLYQGLSTATKDTYDALHMQALPPR

SEQ ID NO: 2483 - protein, 652 aa, Artificial Sequence
  source: /note="Description of Artificial Sequence: Synthetic Chimeric Antigen Receptor sequence"
EVKLVESGGGLVKPGGSLKLSCAASGFTFSSYAMSWVRQTPEKRLEWVASISTGASAYFPDSVKGRFTISRDNARNILYLQMSSLRSEDTAMYYCARITTSTWYFDVWGAGTTVTVSSGGGGSGGGGSGGGGSDIKMTQSPSSMYASLGERVTITCKASQDINSYLSWFQQKPGKSPKTLIYRANRLVDGVPSRFSGSGSGQDYSLTISSLEYEDMGIYYCLQYDEFPYTFGGGTKLEIKEPKSPDKTHTCPPCPAPPVAGPSVFLFPPKPKDTLMIARTPEVTCVVVDVSHEDPEVKFNWYVDGVEVHNAKTKPREEQYNSTYRVVSVLTVLHQDWLNGKEYKCKVSNKALPAPIEKTISKAKGQPREPQVYTLPPSRDELTKNQVSLTCLVKGFYPSDIAVEWESNGQPENNYKTTPPVLDSDGSFFLYSKLTVDKSRWQQGNVFSCSVMHEALHNHYTQKSLSLSPGKIISFFLALTSTALLFLLFFLTLRFSVVKRGRKKLLYIFKQPFMRPVQTTQEEDGCSCRFPEEEEGGCELRVKFSRSADAPAYQQGQNQLYNELNLGRREEYDVLDKRRGRDPEMGGKPRRKNPQEGLYNELQKDKMAEAYSEIGMKGERRRGKGHDGLYQGLSTATKDTYDALHMQALPPR

SEQ ID NO: 2484 - protein, 652 aa, Artificial Sequence
  source: /note="Description of Artificial Sequence: Synthetic Chimeric Antigen Receptor sequence"
QVQLQQSGAELVRPGASVTLSCKASGYTFSDYEMHWVIQTPVHGLEWIGAIDPETGGTAYNQKFKGKAILTADKSSSTAYMELRSLTSEDSAVYYCTGYYDYDSFTYWGQGTLVTVSAGGGGSGGGGSGGGGSDIVMTQSQKIMSTTVGDRVSITCKASQNVDAAVAWYQQKPGQSPKLLIYSASNRYTGVPDRFTGSGSGTDFTLTISNMQSEDLADYFCQQYDIYPYTFGGGTKLEIKEPKSPDKTHTCPPCPAPPVAGPSVFLFPPKPKDTLMIARTPEVTCVVVDVSHEDPEVKFNWYVDGVEVHNAKTKPREEQYNSTYRVVSVLTVLHQDWLNGKEYKCKVSNKALPAPIEKTISKAKGQPREPQVYTLPPSRDELTKNQVSLTCLVKGFYPSDIAVEWESNGQPENNYKTTPPVLDSDGSFFLYSKLTVDKSRWQQGNVFSCSVMHEALHNHYTQKSLSLSPGKIISFFLALTSTALLFLLFFLTLRFSVVKRGRKKLLYIFKQPFMRPVQTTQEEDGCSCRFPEEEEGGCELRVKFSRSADAPAYQQGQNQLYNELNLGRREEYDVLDKRRGRDPEMGGKPRRKNPQEGLYNELQKDKMAEAYSEIGMKGERRRGKGHDGLYQGLSTATKDTYDALHMQALPPR

SEQ ID NO: 2485 - protein, 653 aa, Artificial Sequence
  source: /note="Description of Artificial Sequence: Synthetic Chimeric Antigen Receptor sequence"
EVKLVESGGGLVKPGGSLKLSCAASGFTFSSYAMSWVRQIPEKRLEWVASISRGGTTYYPDSVKGRFTISRDNVRNILYLQMSSLRSEDTAMYYCGRYDYDGYYAMDYWGQGTSVTVSSGGGGSGGGGSGGGGSDIKMTQSPSSMYASLGERVTITCKASPDINSYLSWFQQKPGKSPKTLIYRANRLVDGVPSRFSGGGSGQDYSLTINSLEYEDMGIYYCLQYDEFPYTFGGGTKLEMKEPKSPDKTHTCPPCPAPPVAGPSVFLFPPKPKDTLMIARTPEVTCVVVDVSHEDPEVKFNWYVDGVEVHNAKTKPREEQYNSTYRVVSVLTVLHQDWLNGKEYKCKVSNKALPAPIEKTISKAKGQPREPQVYTLPPSRDELTKNQVSLTCLVKGFYPSDIAVEWESNGQPENNYKTTPPVLDSDGSFFLYSKLTVDKSRWQQGNVFSCSVMHEALHNHYTQKSLSLSPGKIISFFLALTSTALLFLLFFLTLRFSVVKRGRKKLLYIFKQPFMRPVQTTQEEDGCSCRFPEEEEGGCELRVKFSRSADAPAYQQGQNQLYNELNLGRREEYDVLDKRRGRDPEMGGKPRRKNPQEGLYNELQKDKMAEAYSEIGMKGERRRGKGHDGLYQGLSTATKDTYDALHMQALPPR

SEQ ID NO: 2486 - protein, 653 aa, Artificial Sequence
  source: /note="Description of Artificial Sequence: Synthetic Chimeric Antigen Receptor sequence"
EVQLQQSGPELEKPGASVKISCKASGFAFTGYNMNWVKQTNGKSLEWIGSIDPYYGGSTYNQKFKDKATLTVDKSSSTAYMQLKSLTSDDSAVYYCARSPGGDYAMDYWGQGTSVTVSSGGGGSGGGGSGGGGSDIKMTQSPSSMYASVGERVTITCKASQGINSYSGWFQQKPGKSPKTLIYRGNRLVDGVPSRFSGSGSGQDYSLTISSLEYEDMGIYYCLQYDEFPYTFGGGTKLEIKEPKSPDKTHTCPPCPAPPVAGPSVFLFPPKPKDTLMIARTPEVTCVVVDVSHEDPEVKFNWYVDGVEVHNAKTKPREEQYNSTYRVVSVLTVLHQDWLNGKEYKCKVSNKALPAPIEKTISKAKGQPREPQVYTLPPSRDELTKNQVSLTCLVKGFYPSDIAVEWESNGQPENNYKTTPPVLDSDGSFFLYSKLTVDKSRWQQGNVFSCSVMHEALHNHYTQKSLSLSPGKIISFFLALTSTALLFLLFFLTLRFSVVKRGRKKLLYIFKQPFMRPVQTTQEEDGCSCRFPEEEEGGCELRVKFSRSADAPAYQQGQNQLYNELNLGRREEYDVLDKRRGRDPEMGGKPRRKNPQEGLYNELQKDKMAEAYSEIGMKGERRRGKGHDGLYQGLSTATKDTYDALHMQALPPR

SEQ ID NO: 2487 - protein, 653 aa, Artificial Sequence
  source: /note="Description of Artificial Sequence: Synthetic Chimeric Antigen Receptor sequence"
QVQLQQPGAELVKPGTSVKLSCKASGYNFTNYWINWVKLRPGQGLEWIGEIYPGSGSTNYNEKFKSKATLTADTSSSTAYMQLSSLASEDSALYYCARDGNYYAMDYWGQGTSVTVSSGGGGSGGGGSGGGGSDIQMTQTTSSLSASLGDRVTITCRASQDINNYLNWYQQKPDGTVKLLIYYTSALHSGVPSRFSGSGSGTDYSLTISNLEQEDIATYFCQQGNTLPPYTFGGGTKLEIKEPKSPDKTHTCPPCPAPPVAGPSVFLFPPKPKDTLMIARTPEVTCVVVDVSHEDPEVKFNWYVDGVEVHNAKTKPREEQYNSTYRVVSVLTVLHQDWLNGKEYKCKVSNKALPAPIEKTISKAKGQPREPQVYTLPPSRDELTKNQVSLTCLVKGFYPSDIAVEWESNGQPENNYKTTPPVLDSDGSFFLYSKLTVDKSRWQQGNVFSCSVMHEALHNHYTQKSLSLSPGKIISFFLALTSTALLFLLFFLTLRFSVVKRGRKKLLYIFKQPFMRPVQTTQEEDGCSCRFPEEEEGGCELRVKFSRSADAPAYQQGQNQLYNELNLGRREEYDVLDKRRGRDPEMGGKPRRKNPQEGLYNELQKDKMAEAYSEIGMKGERRRGKGHDGLYQGLSTATKDTYDALHMQALPPR

SEQ ID NO: 2488 - protein, 654 aa, Artificial Sequence
  source: /note="Description of Artificial Sequence: Synthetic Chimeric Antigen Receptor sequence"
EVKLQESGAELARPGASVKMSCKASGYTFTSYTMHWVKQRPGQGLEWIGYINPSSGYTEYNQKFKDKTTLTADKSSSTAYMQLSSLTSGDSAVYYCARRVLWLRRGDYWGQGTILTVSAGGGGSGGGGSGGGGSMEVLITQTPSSLSASLGERVSLTCRASQDIGSSLNWLQQEPDGTIKRLIYATSSLDSGVPKRFSGSRSGSDYSLTISSLESEDFVDYYCLQYASSPYTFGGGTKLELKEPKSPDKTHTCPPCPAPPVAGPSVFLFPPKPKDTLMIARTPEVTCVVVDVSHEDPEVKFNWYVDGVEVHNAKTKPREEQYNSTYRVVSVLTVLHQDWLNGKEYKCKVSNKALPAPIEKTISKAKGQPREPQVYTLPPSRDELTKNQVSLTCLVKGFYPSDIAVEWESNGQPENNYKTTPPVLDSDGSFFLYSKLTVDKSRWQQGNVFSCSVMHEALHNHYTQKSLSLSPGKIISFFLALTSTALLFLLFFLTLRFSVVKRGRKKLLYIFKQPFMRPVQTTQEEDGCSCRFPEEEEGGCELRVKFSRSADAPAYQQGQNQLYNELNLGRREEYDVLDKRRGRDPEMGGKPRRKNPQEGLYNELQKDKMAEAYSEIGMKGERRRGKGHDGLYQGLSTATKDTYDALHMQALPPR

SEQ ID NO: 2489 - protein, 669 aa, Artificial Sequence
  source: /note="Description of Artificial Sequence: Synthetic Chimeric Antigen Receptor sequence"
MALPVTALLLPLALLLHAARPQVQLQESGPGLVKPSETLSLTCTVSGFSLTSYGYVHWVRQPPGKGLEWLGVIWAGGFTNYNPSLKSRLTISKDNSKNQVSLKLSSVTAADTAVYYCARRGSSYSMDYWGQGTLVTVSSGGGGSGGGGSGGGGSEIVLTQSPATLSLSPGERATLSCRASSNVSYIHWYQQKPGQAPRPWIYEISKLATGIPARFSGSGSGTDYTLTISSLEPEDFAVYYCQQWNYPLITFGQGTKLEIKEPKSPDKTHTCPPCPAPPVAGPSVFLFPPKPKDTLMIARTPEVTCVVVDVSHEDPEVKFNWYVDGVEVHNAKTKPREEQYNSTYRVVSVLTVLHQDWLNGKEYKCKVSNKALPAPIEKTISKAKGQPREPQVYTLPPSRDELTKNQVSLTCLVKGFYPSDIAVEWESNGQPENNYKTTPPVLDSDGSFFLYSKLTVDKSRWQQGNVFSCSVMHEALHNHYTQKSLSLSPGKIYIWAPLAGTCGVLLLSLVITLYCKRGRKKLLYIFKQPFMRPVQTTQEEDGCSCRFPEEEEGGCELRVKFSRSADAPAYQQGQNQLYNELNLGRREEYDVLDKRRGRDPEMGGKPRRKNPQEGLYNELQKDKMAEAYSEIGMKGERRRGKGHDGLYQGLSTATKDTYDALHMQALPPR

SEQ ID NO: 2490 - protein, 670 aa, Artificial Sequence
  source: /note="Description of Artificial Sequence: Synthetic Chimeric Antigen Receptor sequence"
MALPVTALLLPLALLLHAARPEVQLVESGGGLVKPGGSLRLSCAASGFTFSSYAMSWVRQAPGKGLEWVASISTGASAYFADSVKGRFTISRDNAKNSLYLQMNSLRAEDTAVYYCARITTSTWYFDVWGQGTTVTVSSGGGGSGGGGSGGGGSDIQMTQSPSSLSASVGDRVTITCRASQDINSYLSWFQQKPGKAPKTLIYRANRLQSGVPSRFSGSGSGQDYTLTISSLQPEDFATYYCLQYDEFPYTFGQGTKLEIKEPKSPDKTHTCPPCPAPPVAGPSVFLFPPKPKDTLMIARTPEVTCVVVDVSHEDPEVKFNWYVDGVEVHNAKTKPREEQYNSTYRVVSVLTVLHQDWLNGKEYKCKVSNKALPAPIEKTISKAKGQPREPQVYTLPPSRDELTKNQVSLTCLVKGFYPSDIAVEWESNGQPENNYKTTPPVLDSDGSFFLYSKLTVDKSRWQQGNVFSCSVMHEALHNHYTQKSLSLSPGKIYIWAPLAGTCGVLLLSLVITLYCKRGRKKLLYIFKQPFMRPVQTTQEEDGCSCRFPEEEEGGCELRVKFSRSADAPAYQQGQNQLYNELNLGRREEYDVLDKRRGRDPEMGGKPRRKNPQEGLYNELQKDKMAEAYSEIGMKGERRRGKGHDGLYQGLSTATKDTYDALHMQALPPR

SEQ ID NO: 2491 - protein, 672 aa, Artificial Sequence
  source: /note="Description of Artificial Sequence: Synthetic Chimeric Antigen Receptor sequence"
MALPVTALLLPLALLLHAARPQVQLQESGPGLVKPSETLSLTCTVSGFSLTSYGYVHWVRQPPGKGLEWLGVIWAGGFTNYNPSLKSRLTISKDNSKNQVSLKLSSVTAADTAVYYCARRGSSYSMDYWGQGTLVTVSSGGGGSGGGGSGGGGSEIVLTQSPATLSLSPGERATLSCRASSNVSYIHWYQQKPGQAPRPWIYEISKLATGIPARFSGSGSGTDYTLTISSLEPEDFAVYYCQQWNYPLITFGQGTKLEIKEPKSPDKTHTCPPCPAPPVAGPSVFLFPPKPKDTLMIARTPEVTCVVVDVSHEDPEVKFNWYVDGVEVHNAKTKPREEQYNSTYRVVSVLTVLHQDWLNGKEYKCKVSNKALPAPIEKTISKAKGQPREPQVYTLPPSRDELTKNQVSLTCLVKGFYPSDIAVEWESNGQPENNYKTTPPVLDSDGSFFLYSKLTVDKSRWQQGNVFSCSVMHEALHNHYTQKSLSLSPGKIISFFLALTSTALLFLLFFLTLRFSVVKRGRKKLLYIFKQPFMRPVQTTQEEDGCSCRFPEEEEGGCELRVKFSRSADAPAYQQGQNQLYNELNLGRREEYDVLDKRRGRDPEMGGKPRRKNPQEGLYNELQKDKMAEAYSEIGMKGERRRGKGHDGLYQGLSTATKDTYDALHMQALPPR

SEQ ID NO: 2492 - protein, 673 aa, Artificial Sequence
  source: /note="Description of Artificial Sequence: Synthetic Chimeric Antigen Receptor sequence"
MALPVTALLLPLALLLHAARPEVQLVESGGGLVKPGGSLRLSCAASGFTFSSYAMSWVRQAPGKGLEWVASISTGASAYFADSVKGRFTISRDNAKNSLYLQMNSLRAEDTAVYYCARITTSTWYFDVWGQGTTVTVSSGGGGSGGGGSGGGGSDIQMTQSPSSLSASVGDRVTITCRASQDINSYLSWFQQKPGKAPKTLIYRANRLQSGVPSRFSGSGSGQDYTLTISSLQPEDFATYYCLQYDEFPYTFGQGTKLEIKEPKSPDKTHTCPPCPAPPVAGPSVFLFPPKPKDTLMIARTPEVTCVVVDVSHEDPEVKFNWYVDGVEVHNAKTKPREEQYNSTYRVVSVLTVLHQDWLNGKEYKCKVSNKALPAPIEKTISKAKGQPREPQVYTLPPSRDELTKNQVSLTCLVKGFYPSDIAVEWESNGQPENNYKTTPPVLDSDGSFFLYSKLTVDKSRWQQGNVFSCSVMHEALHNHYTQKSLSLSPGKIISFFLALTSTALLFLLFFLTLRFSVVKRGRKKLLYIFKQPFMRPVQTTQEEDGCSCRFPEEEEGGCELRVKFSRSADAPAYQQGQNQLYNELNLGRREEYDVLDKRRGRDPEMGGKPRRKNPQEGLYNELQKDKMAEAYSEIGMKGERRRGKGHDGLYQGLSTATKDTYDALHMQALPPR

SEQ ID NO: 2493 - protein, 689 aa, Artificial Sequence
  source: /note="Description of Artificial Sequence: Synthetic Chimeric Antigen Receptor sequence"
TAMDFQVQIFSFLLISASVIMSREVQLVETGGGLVQPGKSLELTCATSGFTFNTAWMHWVRQSPDKRLEWIARIKDTSNNYATDYVESMKGRFTISRDDSKGSVNLQMNSLKEEDTATYYCTTDFYDGTYYWNYWGQGVMVTVSSGGGGSGGGGSGGGGSSYELIQPPSAAVTLGNTVSLTCVGDELPKRYAYWYQQKPDQSIVRVIYEDSVRPPGISDRFSGSSSGTTATLTIRDAQNEDEADYYCQSTYGDDKLYIFGGGTKLTVLGDPAEPKSPDKTHTCPPCPAPELLGGPSVFLFPPKPKDTLMISRTPEVTCVVVDVSHEDPEVKFNWYVDGVEVHNAKTKPREEQYNSTYRVVSVLTVLHQDWLNGKEYKCKVSNKALPAPIEKTISKAKGQPREPQVYTLPPSRDELTKNQVSLTCLVKGFYPSDIAVEWESNGQPENNYKTTPPVLDSDGSFFLYSKLTVDKSRWQQGNVFSCSVMHEALHNHYTQKSLSLSPGKKDPKFWVLVVVGGVLACYSLLVTVAFIIFWVRSKRSRLLHSDYMNMTPRRPGPTRKHYQPYAPPRDFAAYRSLRVKFSRSADAPAYQQGQNQLYNELNLGRREEYDVLDKRRGRDPEMGGKPRRKNPQEGLYNELQKDKMAEAYSEIGMKGERRRGKGHDGLYQGLSTATKDTYDALHMQALPPR

SEQ ID NO: 2494 - protein, 679 aa, Artificial Sequence
  source: /note="Description of Artificial Sequence: Synthetic Chimeric Antigen Receptor sequence"
MDFQVQIFSFLLISASVIMSRQVQLKESGPGLVAPSQSLSITCTVSGFSLSSQGVYWVRQPPGKGLEWLGAIWAGGSTNYNSALMSRLSISKDNSKSQVFLKMNSLQTDDTAMYYCARVDGYRGYNMDYWGQGTSVTVSSGGGGSGGGGSGGGGSENVLTQSPAIMSASPGEKVTMTCSASSSVSYMHWYQQKSSTSPKLWIYDTSKLASGVPGRFSGSGSGNSYSLTISSMEAEDVATYYCFQGSGYPLTFGAGTKLELKAAALPAEPKSPDKTHTCPPCPAPPVAGPSVFLFPPKPKDTLMIARTPEVTCVVVDVSHEDPEVKFNWYVDGVEVHNAKTKPREEQYNSTYRVVSVLTVLHQDWLNGKEYKCKVSNKALPAPIEKTISKAKGQPREPQVYTLPPSRDELTKNQVSLTCLVKGFYPSDIAVEWESNGQPENNYKTTPPVLDSDGSFFLYSKLTVDKSRWQQGNVFSCSVMHEALHNHYTQKSLSSLSPGKKIYIWAPLAGTCGVLLLSLVITLYCKRGRKKLLYIFKQPFMRPVQTTQEEDGCSCRFPEEEEGGCELLRVKFSRSADAPAYQQGQNQLYNELNLGRREEYDVLDKRRGRDPEMGGKPRRKNPQEGLYNELQKDKMAEAYSEIGMKGERRRGKGHDGLYQGLSTATKDTYDALHMQALPPR

SEQ ID NO: 2495 - protein, 383 aa, Artificial Sequence
  source: /note="Description of Artificial Sequence: Synthetic polypeptide"
MALPVTALLLPLALLLHAARPQVQLQQSGPELEKPGASVKISCKASGYSFTGYTMNWVKQSHGKSLEWIGLITPYNGASSYNQKFRGKATLTVDKSSSTAYMDLLSLTSEDSAVYFCARGGYDGRGFDYWGQGTTVTVSSGGGGSGGGGSGGGGSDIELTQSPAIMSASPGEKVTMTCSASSSVSYMHWYQQKSGTSPKRWIYDTSKLASGVPGRFSGSGSGNSYSLTISSVEAEDDATYYCQQWSGYPLTFGAGTKLEITTTPAPRPPTPAPTIASQPLSLRPEACRPAAGGAVHTRGLDFACDIYIWAPLAGTCGVLLLSLVITLYCKRGRKKLLYIFKQPFMRPVQTTQEEDGCSCRFPEEEEGGCELRVKFSRSADAPA

SEQ ID NO: 2496 - protein, 458 aa, Artificial Sequence
  source: /note="Description of Artificial Sequence: Synthetic Chimeric Antigen Receptor sequence"
MALPVTALLLPLALLLHAARPEVQLQQSGPDLVKPGASVKISCKASGYSFTGYYMHWVKQSHGKSLEWIGRINPNNGVTLYNQKFKDKAILTVDKSSTTAYMELRSLTSEDSAVYYCARSTMITNYVMDYWGQVTSVTVSSGGGGSGGGGSGGGGSSIVMTQTPTFLLVSAGDRVTITCKASQSVSNDVAWYQQKPGQSPTLLISYTSSRYAGVPDRFIGSGYGTDFTFTISTLQAEDLAVYFCQQDYNSPPTFGGGTKLEIKRGLAVSTISSFFPPGYQIYIWAPLAGTCGVLLLSLVITLYCKRGRKKLLYIFKQPFMRPVQTTQEEDGCSCRFPEEEEGGCELRVKFSRSADAPAYQQGQNQLYNELNLGRREEYDVLDKRRGRDPEMGGKPRRKNPQEGLYNELQKDKMAEAYSEIGMKGERRRGKGHDGLYQGLSTATKDTYDALHMQALPPR

SEQ ID NO: 2497 - protein, 679 aa, Artificial Sequence
  source: /note="Description of Artificial Sequence: Synthetic Chimeric Antigen Receptor sequence"
MDFQVQIFSFLLISASVIMSRENVLTQSPAIMSASPGEKVTMTCSASSSVSYMHWYQQKSSTSPKLWIYDTSKLASGVPGRFSGSGSGNSYSLTISSMEAEDVATYYCFQGSGYPLTFGAGTKLELKGGGGSGGGGSGGGGSQVQLKESGPGLVAPSQSLSITCTVSGFSLSSQGVYWVRQPPGKGLEWLGAIWAGGSTNYNSALMSRLSISKDNSKSQVFLKMNSLQTDDTAMYYCARVDGYRGYNMDYWGQGTSVTVSSAAALPAEPKSPDKTHTCPPCPAPPVAGPSVFLFPPKPKDTLMIARTPEVTCVVVDVSHEDPEVKFNWYVDGVEVHNAKTKPREEQYNSTYRVVSVLTVLHQDWLNGKEYKCKVSNKALPAPIEKTISKAKGQPREPQVYTLPPSRDELTKNQVSLTCLVKGFYPSDIAVEWESNGQPENNYKTTPPVLDSDGSFFLYSKLTVDKSRWQQGNVFSCSVMHEALHNHYTQKSLSSLSPGKKIYIWAPLAGTCGVLLLSLVITLYCKRGRKKLLYIFKQPFMRPVQTTQEEDGCSCRFPEEEEGGCELLRVKFSRSADAPAYQQGQNQLYNELNLGRREEYDVLDKRRGRDPEMGGKPRRKNPQEGLYNELQKDKMAEAYSEIGMKGERRRGKGHDGLYQGLSTATKDTYDALHMQALPPR

SEQ ID NO: 2498 - protein, 1345 aa, Artificial Sequence
  source: /note="Description of Artificial Sequence: Synthetic Chimeric Antigen Receptor sequence"
MSLPVTALLLPLALLLHAARPDIQMTQTTSSLSASLGDRVTISCRASQDISKYLNWYQQKPDGTVKLLIYHTSRLHSGVPSRFSGSGSGTDYSLTISNLEQEDIATYFCQQGNTLPYTFGGGTKLEITKAGGGGSGGGGSGGGGSGGGGSEVKLQESGPGLVAPSQSLSVTCTVSGVSLPDYGVSWIRQPPRKGLEWLGVIWGSETTYYNSALKSRLTIIKDNSKSQVFLKMNSLQTDDTAIYYCAKHYYYGGSYAMDYWGQGTSVTVSSDPTTTPAPRPPTPAPTIASQPLSLRPEACRPAAGGAVHTRGLDFACDIFVLVWGGVLACYSLLVTVAFIIFVVVRRVKFSRSADAPAYQQGQNQLYNELNLGRREEYDVLDKRRGRDPEMGGKPRRKNPQEGLYNELQKDKMAEAYSEIGMKGERRRGKGHDGLYQGLSTATKDTYDALHMQALPPRRAEGRGSLLTCGDVEENPGPMAVPTQVLGLLLLWLTDARCDIQMTQSPSSLSASVGDRVTITCRASEDIYFNLVWYQQKPGKAPKLLIYDTNRLADGVPSRFSGSGSGTQYTLTISSLQPEDFATYYCQHYKNYPLTFGQGTKLEIKRSGGGGSGGGGSGGGGSGGGGSRSEVQLVESGGGLVQPGGSLRLSCAASGFTLSNYGMHWIRQAPGKGLEWVSSISLNGGSTYYRDSVKGRFTISRDNAKSTLYLQMNSLRAEDTAVYYCAAQDAYTGGYFDYWGQGTLVTVSSMDPAEPKSPDKTHTCPPCPAPPVAGPSVFLFPPKPKDTLMIARTPEVTCVWDVSHEDPEVKFNWYVDGVEVHNAKTKPREEQYNSTYRWSVLTVLHQDWLNGKEYKCKVSNALPAPIEKTISKAKGQPREPQVYTLPPSRDELTNQVSLTCLVKGFYPSDIAVEWESNGQPENNYKTTPPVLDSDGSFFLYSKLTVDKSRWQQGNVFSCSVMHEALHNHYTQKSLSLSPGKKDPKAVFGCIFGALVIVTVGGFIFWRKKRKDAKNNEVSFSQIKPKKSKLIRVENFEAYFKKQQADSNCGFAEEYEDLKLVGISQPKYAAELAENRGKNRYNNVLPYDISRVKLSVQTHSTDDYINANYMPGYHSKKDFIATQGPLPNTLKDFWRMVWEKNVYAIIMLTKCVEQGRTKCEEYWPSKQAQDYGDITVAMTSEIVLPEWTIRDFTVKNIQTSESHPLRQFHFTSWPDHGVPDTTDLLINFRYLVRDYMKQSPPESPILVHCSAGVGRTGTFIAIDRLIYQIENENTVDVYGIVYDLRMHRPLMVQTEDQYVFLNQCVLDIVRSQKDSKVDLIYQNTTAMTIYENLAPVTTFGKTNGYIA

SEQ ID NO: 2499 - protein, 912 aa, Artificial Sequence
  source: /note="Description of Artificial Sequence: Synthetic Chimeric Antigen Receptor sequence"
SLPVTALLLPLALLLHAARPDIQMTQTTSSLSASLGDRVTISCRASQDISKYLNWYQQKPDGTVKLLIYHTSRLHSGVPSRFSGSGSGTDYSLTISNLEQEDIATYFCQQGNTLPYTFGGGTKLEITKAGGGGSGGGGSGGGGSGGGGSEVKLQESGPGLVAPSQSLSVTCTVSGVSLPDYGVSWIRQPPRKGLEWLGVIWGSETTYYNSALKSRLTIIKDNSKSQVFLKMNSLQTDDTAIYYCAKHYYYGGSYAMDYWGQGTSVTVSSDPTTTPAPRPPTPAPTIASQPLSLRPEACRPAAGGAVHTRGLDFACDIFVWLVWGGVLACYSLLVTVAFIIFWVRRVKFSRSADAPAYQQGQNQLYNELNLGRREEYDVLDKRRGRDPEMGGKPRRKNPQEGLYNELQKDKMAEAYSEIGMKGERRRGKGHDGLYQGLSTATKDTYDALHMQALPPRRAEGRGSLLTCGDVEENPGPMAVPTQVLGLLLLWLTDARCDIQMTQSPSSLSASVGDRVTITCRASEDIYFNLVWYQQKPGKAPKLLIYDTNRLADGVPSRFSGSGSGTQYTLTISSLQPEDFATYYCQHYKNYPLTFGQGTKLEIKRSGGGGSGGGGSGGGGSGGGGSRSEVQLVESGGGLVQPGGSLRLSCAASGFTLSNYGMHWIRQAPGKGLEWVSSISLNGGSTYYRDSVKGRFTISRDNAKSTLYLQNSLRAEDTAVYYCAAQDAYTGGYFDYWGQGTLVTVSSMDPATTTKPVLRTPSPVHPTGTSQPQRPEDCRPRGSVKGTGLDFACDILIGVSWFLFCLLLLVLFCLHRQNQIKQGPPRSKDEEQKPQQRPDLAVDVLERTADKANGLPEKDRETDTSALAAGSSQEVTYAQLDHWALTQRTARAVSPQSTKPMAESITYAAVARH

SEQ ID NO: 2500 - protein, 1112 aa, Artificial Sequence
  source: /note="Description of Artificial Sequence: Synthetic Chimeric Antigen Receptor sequence"
MSLPVTALLLPLALLLHAARPDIQMTQTTSSLSASLGDRVTISCRASQDISKYLNWYQQKPDGTVKLLIYHTSRLHSGVPSRFSGSGSGTDYSLTISNLEQEDIATYFCQQGNTLPYTFGGGTKLEITKAGGGGSGGGGSGGGGSGGGGSEVKLQESGPGLVAPSQSLSVTCTVSGVSLPDYGVSWIRQPPRKGLEWLGVIWGSETTYYNSALKSRLTIIKDNSKSQVFLKMNSLQTDDTAIYYCAKHYYYGGSYAMDYWGQGTSVTVSSDPTTTPAPRPPTPAPTIASQPLSLRPEACRPAAGGAVHTRGLDFACDIFVWLWVGGVLACYSLLVTVAFIIFVWRRVKFSRSADAPAYQQGQNQLYNELNLGRREEYDVLDKRRGRDPEGGKPRRKNPQEGLYNELQKDKMAEAYSEIGKGERRRGKGHDGLYQGLSTATKDTYDALHMQALPPRRAEGRGSLLTCGDVEENPGPMAVPTQVLGLLLLWLTDARCDIQMTQSPSSLSASVGDRVTITCRASEDIYFNLNAAYQQKPGKAPKLLIYDTNRLADGVPSRFSGSGSGTQYTLTISSLQPEDFATYYCQHYKNYPLTFGQGTKLEIKRSGGGGSGGGGSGGGGSGGGGSRSEVQLVESGGGLVQPGGSLRLSCAASGFTLSNYGMHWIRQAPGKGLEWVSSISLNGGSTYYRDSVKGRFTISRDNAKSTLYLQMNSLRAEDTAVYYCAAQDAYTGGYFDYWGQGTLVTVSSMDPATTTKPVLRTPSPVHPTGTSQPQRPEDCRPRGSVKGTGLDFACDIYWAPLAGICVALLLSLIITLICYHRSRKRVCKSGGGSFWEEFESLQKQEVKNLHQRLEGQRPENKGKNRYKNILPFDHSRVILQGRDSNIPGSDYINANYIKNQLLGPDENAKTYIASQGCLEATVNDFWQMAWQENSRVIVMTTREVEKGRNKCVPYWPEVGMQRAYGPYSVTNCGEHDTTEYKLRTLQVSPLDNGDLIREIWHYQYLSWPDHGVPSEPGGVLSFLDQINQRQESLPHAGPIIVHCSAGIGRTGTIIVIDMLMENISTKGLDCDIDIQKTIQMVRAQRSGMVQTEAQYKFIYVAIAQFIETTKKKL

SEQ ID NO: 2501 - protein, 1363 aa, Artificial Sequence
  source: /note="Description of Artificial Sequence: Synthetic Chimeric Antigen Receptor sequence"
MSLPVTALLLPLALLLHAARPDIQMTQTTSSLSASLGDRVTISCRASQDISKYLNWYQQKPDGTVKLLIYHTSRLHSGVPSRFSGSGSGTDYSLTISNLEQEDIATYFCQQGNTLPYTFGGGTKLEITKAGGGGSGGGGSGGGGSGGGGSEVKLQESGPGLVAPSQSLSVTCTVSGVSLPDYGVSWIRQPPRKGLEWLGVIWGSETTYYNSALKSRLTIIKDNSKSQVFLKMNSLQTDDTAIYYCAKHYYYGGSYAMDYWGQGTSVTVSSDPTTTPAPRPPTPAPTIASQPLSLRPEACRPAAGGAVHTRGLDFACDIFWVLVVVGGVLACYSLLVTVAFIIFWVRRVKFSRSADAPAYQQGQNQLYNELNLGRREEYDVLDKRRGRDPEMGGKPRRKNPQEGLYNELQKDKMAEAYSEIGMKGERRRGKGHDGLYQGLSTATKDTYDALHMQALPPRRAEGRGSLLTCGDVEENPGPMAVPTQVLGLLLLWLTDARCDIQMTQSPSSLSASVGDRVTITCRASEDIYFNLVWYQQKPGKAPKLLIYDTNRLADGVPSRFSGSGSGTQYTLTISSLQPEDFATYYCQHYKNYPLTFGQGTKLEIKRSGGGGSGGGGSGGGGSGGGGSRSEVQLVESGGGLVQPGGSLRLSCAASGFTLSNYGMHWIRQAPGKGLEWVSSISLNGGSTYYRDSVKGRFTISRDNAKSTLYLQMNSLRAEDTAVYYCAAQDAYTGGYFDYWGQGTLVTVSSMDPATTTKPVLRTPSPVHPTGTSQPQRPEDCRPRGSVKGTGLDFACDILIGVSVVFLFCLLLLVLFCLHRQNQIKQGPPRSKDEEQKPQQRPDLAVDVLERTADKATVNGLPEKDRETDTSALAAGSSQEVTYAQLDHWALTQRTARAVSPQSTKPMAESITYAAVARHRAEGRGSLLTCGDVEENPGPWYHGHMSGGQAETLLQAKGEPWTFLVRESLSQPGDFVLSVLSDQPKAGPGSPLRVTHIKVMCEGGRYTVGGLETFDSLTDLVEHFKKTGIEEASGAFVYLRQPYSGGGGSFEAYFKKQQADSNCGFAEEYEDLKLVGISQPKYAAELAENRGKNRYNNVLPYDISRVKLSVQTHSTDDYINANYMPGYHSKKDFIATQGPLPNTLKDFWRMVWEKNVYAIIMLTKCVEQGRTKCEEYWPSKQAQDYGDITVAMTSEIVLPEWTIRDFTVKNIQTSESHPLRQFHFTSWPDHGVPDTTDLLINFRYLVRDYMKQSPPESPILVHCSAGVGRTGTFIAIDRLIYQIENENTVDVYGIVYDLRMHRPLMVQTEDQYVFLNQCVLDIVRSQKDSKVDLIYQNTTAMTIYENLAPVTTFGKTNGYIASGS

SEQ ID NO: 2502 - protein, 489 aa, Artificial Sequence
  source: /note="Description of Artificial Sequence: Synthetic Chimeric Antigen Receptor sequence"
MALPVTALLLPLALLLHAARPQVTLKESGPGILKPSQTLSLTCSFSGFSLSTSGMGVGWIRQPSGKGLEWLAHIWWDDDKYYNPSLKSQLTISKDTSRNQVFLKITSVDTADTATYYCSRRPRGTMDAMDYWGQGTSVTVSSGGGGSGGGGSGGGGSDIVMTQAASSLSASLGDRVTISCRASQDISKYLNWYQQKPDGTVKLLIYYTSRLHSGVPSRFSGSGSGTDYSLTIRNLEQEDIATYFCQQVYTLPWTFGGGTKLEIKSGTTTPAPRPPTPAPTIASQPLSLRPEACRPAAGGAVHTRGLDFACDIYIWAPLAGTCGVLLLSLVITLYCKRGRKKLLYIFKQPFMRPVQTTQEEDGCSCRFPEEEEGGCELRVKFSRSADAPAYKQGQNQLYNELNLGRREEYDVLDKRRGRDPEMGGKPRRKNPQEGLYNELQKDKMAEAYSEIGMKGERRRGKGHDGLYQGLSTATKDTYDALHMQALPPR

SEQ ID NO: 2503 - protein, 455 aa, Artificial Sequence
  source: /note="Description of Artificial Sequence: Synthetic Chimeric Antigen Receptor sequence"
MALPVTALLLPLALLLHAARPQIQLVQSGPELKKPGETVKISCKASGYTFTNFGMNWVKQGPGEGLKWMGWINTNTGEPRYAEEFKGRFAFSLETTASTAYLQINNLKNEDTATYFCARDWDGAYFFDYWGQGTTLTVSSGGGSGGGGSGGGGSSIVMTQTPKFLLVSAGDRVTITCKASQSVSNDVAWYQQKPGQSPKLLINFATNRYTGVPNRFTGSGYGTDFTFTISTVQAEDLALYFCQQDYSSPWTFGGGTKLEIKGLAVSTISSFFPPGYQIYIWAPLAGTCGVLLLSLVITLYCKRGRKKLLYIFKQPFMRPVQTTQEEDGCSCRFPEEEEGGCELRVKFSRSADAPAYQQGQNQLYNELNLGRREEYDVLDKRRGRDPEMGGKPRRKNPQEGLYNELQKDKMAEAYSEIGMKGERRRGKGHDGLYQGLSTATKDTYDALHMQALPPR

SEQ ID NO: 2504 - protein, 455 aa, Artificial Sequence
  source: /note="Description of Artificial Sequence: Synthetic Chimeric Antigen Receptor sequence"
MALPVTALLLPLALLLHAARPQVQLQQSRPELVKPGASVKMSCKASGYTFTDYVISWVKQRTGQGLEWIGEIYPGSNSIYYNEKFKGRATLTADKSSSTAYMQLSSLTSEDSAVYFCAMGGNYGFDYWGQGTTLTVSSGGGGSGGGGSGGGGSQIVLTQSPAIMSASLGERVTLTCTASSSVNSNYLHWYQQKPGSSPKLWIYSTSNLASGVPARFSGSGSGTSYSLTISSMEAEDAATYYCHQYHRSPLTFGAGTKLELKGLAVSTISSFFPPGYQIYIWAPLAGTCGVLLLSLVITLYCKRGRKKLLYIFKQPFMRPVQTTQEEDGCSCRFPEEEEGGCELRVKFSRSADAPAYQQGQNQLYNELNLGRREEYDVLDKRRGRDPEMGGKPRRKNPQEGLYNELQKDKMAEAYSEIGMKGERRRGKGHDGLYQGLSTATKDTYDALHMQALPPR

SEQ ID NO: 2505 - protein, 458 aa, Artificial Sequence
  source: /note="Description of Artificial Sequence: Synthetic Chimeric Antigen Receptor sequence"
MALPVTALLLPLALLLHAARPQIQLVQSGPELKKPGETVKISCKASGYTFTNFGMNWVKQGPGEGLKWMGWINTNTGEPRYAEEFKGRFAFSLETTASTAYLQINNLKNEDTATYFCARDWDGAYFFDYWGQGTTLTVSSGGGSGGGGSGGGGSSIVMTQTPKFLLVSAGDRVTITCKASQSVSNDVAWYQQKPGQSPKLLINFATNRYTGVPNRFTGSGYGTDFTFTISTVQAEDLALYFCQQDYSSPWTFGGGTKLEIKGLAVSTISSFFPPGYQIISFFLALTSTALLFLLFFLTLRFSVVKRGRKKLLYIFKQPFMRPVQTTQEEDGCSCRFPEEEEGGCELRVKFSRSADAPAYQQGQNQLYNELNLGRREEYDVLDKRRGRDPEMGGKPRRKNPQEGLYNELQKDKMAEAYSEIGMKGERRRGKGHDGLYQGLSTATKDTYDALHMQALPPR

SEQ ID NO: 2506 - protein, 458 aa, Artificial Sequence
  source: /note="Description of Artificial Sequence: Synthetic Chimeric Antigen Receptor sequence"
MALPVTALLLPLALLLHAARPQVQLQQSRPELVKPGASVKMSCKASGYTFTDYVISWVKQRTGQGLEWIGEIYPGSNSIYYNEKFKGRATLTADKSSSTAYMQLSSLTSEDSAVYFCAMGGNYGFDYWGQGTTLTVSSGGGGSGGGGSGGGGSQIVLTQSPAIMSASLGERVTLTCTASSSVNSNYLHWYQQKPGSSPKLWIYSTSNLASGVPARFSGSGSGTSYSLTISSMEAEDAATYYCHQYHRSPLTFGAGTKLELKGLAVSTISSFFPPGYQIISFFLALTSTALLFLLFFLTLRFSVVKRGRKKLLYIFKQPFMRPVQTTQEEDGCSCRFPEEEEGGCELRVKFSRSADAPAYQQGQNQLYNELNLGRREEYDVLDKRRGRDPEMGGKPRRKNPQEGLYNELQKDKMAEAYSEIGMKGERRRGKGHDGLYQGLSTATKDTYDALHMQALPPR

SEQ ID NO: 2507 - protein, 459 aa, Artificial Sequence
  source: /note="Description of Artificial Sequence: Synthetic Chimeric Antigen Receptor sequence"
MALPVTALLLPLALLLHAARPEVQLVESGGGLVQPKGSLKLSCAASGFTFNTYAMNWVRQAPGKGLEWVARIRSKSNNYATYYADSVKDRFTISRDDSQSMLYLQMNNLKTEDTAMYYCVRQWDYDVRAMNYWGQGTSVTVSSGGGGSGGGGSGGGGSDIVMTQSHIFMSTSVGDRVSITCKASQDVDTAVAWYQQKPGQSPKLLIYWASTRLTGVPDRFTGSGSGTDFTLTISNVQSEDLADYFCQQYSSYPYTFGGGTKLEIKGLAVSTISSFFPPGYQIYIWAPLAGTCGVLLLSLVITLYCKRGRKKLLYIFKQPFMRPVQTTQEEDGCSCRFPEEEEGGCELRVKFSRSADAPAYQQGQNQLYNELNLGRREEYDVLDKRRGRDPEMGGKPRRKNPQEGLYNELQKDKMAEAYSEIGMKGERRRGKGHDGLYQGLSTATKDTYDALHMQALPPR

SEQ ID NO: 2508 - protein, 461 aa, Artificial Sequence
  source: /note="Description of Artificial Sequence: Synthetic Chimeric Antigen Receptor sequence"
MALPVTALLLPLALLLHAARPEVQLQQSGPDLVKPGASVKISCKASGYSFTGYYMHWVKQSHGKSLEWIGRINPNNGVTLYNQKFKDKAILTVDKSSTTAYMELRSLTSEDSAVYYCARSTMITNYVMDYWGQVTSVTVSSGGGGSGGGGSGGGGSSIVMTQTPTFLLVSAGDRVTITCKASQSVSNDVAWYQQKPGQSPTLLISYTSSRYAGVPDRFIGSGYGTDFTFTISTLQAEDLAVYFCQQDYNSPPTFGGGTKLEIKRGLAVSTISSFFPPGYQIISFFLALTSTALLFLLFFLTLRFSVVKRGRKKLLYIFKQPFMRPVQTTQEEDGCSCRFPEEEEGGCELRVKFSRSADAPAYQQGQNQLYNELNLGRREEYDVLDKRRGRDPEMGGKPRRKNPQEGLYNELQKDKMAEAYSEIGMKGERRRGKGHDGLYQGLSTATKDTYDALHMQALPPR

SEQ ID NO: 2509 - protein, 462 aa, Artificial Sequence
  source: /note="Description of Artificial Sequence: Synthetic Chimeric Antigen Receptor sequence"
MALPVTALLLPLALLLHAARPEVQLVESGGGLVQPKGSLKLSCAASGFTFNTYAMNWVRQAPGKGLEWVARIRSKSNNYATYYADSVKDRFTISRDDSQSMLYLQMNNLKTEDTAMYYCVRQWDYDVRAMNYWGQGTSVTVSSGGGGSGGGGSGGGGSDIVMTQSHIFMSTSVGDRVSITCKASQDVDTAVAWYQQKPGQSPKLLIYWASTRLTGVPDRFTGSGSGTDFTLTISNVQSEDLADYFCQQYSSYPYTFGGGTKLEIKGLAVSTISSFFPPGYQIISFFLALTSTALLFLLFFLTLRFSVVKRGRKKLLYIFKQPFMRPVQTTQEEDGCSCRFPEEEEGGCELRVKFSRSADAPAYQQGQNQLYNELNLGRREEYDVLDKRRGRDPEMGGKPRRKNPQEGLYNELQKDKMAEAYSEIGMKGERRRGKGHDGLYQGLSTATKDTYDALHMQALPPR

SEQ ID NO: 2510 - protein, 484 aa, Artificial Sequence
  source: /note="Description of Artificial Sequence: Synthetic Chimeric Antigen Receptor sequence"
MALPVTALLLPLALLLHAARPQIQLVQSGPELKKPGETVKISCKASGYTFTNFGMNWVKQGPGEGLKWMGWINTNTGEPRYAEEFKGRFAFSLETTASTAYLQINNLKNEDTATYFCARDWDGAYFFDYWGQGTTLTVSSGGGSGGGGSGGGGSSIVMTQTPKFLLVSAGDRVTITCKASQSVSNDVAWYQQKPGQSPKLLINFATNRYTGVPNRFTGSGYGTDFTFTISTVQAEDLALYFCQQDYSSPWTFGGGTKLEIKTTTPAPRPPTPAPTIASQPLSLRPEACRPAAGGAVHTRGLDFACDIYIWAPLAGTCGVLLLSLVITLYCKRGRKKLLYIFKQPFMRPVQTTQEEDGCSCRFPEEEEGGCELRVKFSRSADAPAYQQGQNQLYNELNLGRREEYDVLDKRRGRDPEMGGKPRRKNPQEGLYNELQKDKMAEAYSEIGMKGERRRGKGHDGLYQGLSTATKDTYDALHMQALPPR

SEQ ID NO: 2511 - protein, 484 aa, Artificial Sequence
  source: /note="Description of Artificial Sequence: Synthetic Chimeric Antigen Receptor sequence"
MALPVTALLLPLALLLHAARPQVQLQQSRPELVKPGASVKMSCKASGYTFTDYVISWVKQRTGQGLEWIGEIYPGSNSIYYNEKFKGRATLTADKSSSTAYMQLSSLTSEDSAVYFCAMGGNYGFDYWGQGTTLTVSSGGGGSGGGGSGGGGSQIVLTQSPAIMSASLGERVTLTCTASSSVNSNYLHWYQQKPGSSPKLWIYSTSNLASGVPARFSGSGSGTSYSLTISSMEAEDAATYYCHQYHRSPLTFGAGTKLELKTTTPAPRPPTPAPTIASQPLSLRPEACRPAAGGAVHTRGLDFACDIYIWAPLAGTCGVLLLSLVITLYCKRGRKKLLYIFKQPFMRPVQTTQEEDGCSCRFPEEEEGGCELRVKFSRSADAPAYQQGQNQLYNELNLGRREEYDVLDKRRGRDPEMGGKPRRKNPQEGLYNELQKDKMAEAYSEIGMKGERRRGKGHDGLYQGLSTATKDTYDALHMQALPPR

SEQ ID NO: 2512 - protein, 487 aa, Artificial Sequence
  source: /note="Description of Artificial Sequence: Synthetic Chimeric Antigen Receptor sequence"
MALPVTALLLPLALLLHAARPEVQLQQSGPDLVKPGASVKISCKASGYSFTGYYMHWVKQSHGKSLEWIGRINPNNGVTLYNQKFKDKAILTVDKSSTTAYMELRSLTSEDSAVYYCARSTMITNYVMDYWGQVTSVTVSSGGGGSGGGGSGGGGSSIVMTQTPTFLLVSAGDRVTITCKASQSVSNDVAWYQQKPGQSPTLLISYTSSRYAGVPDRFIGSGYGTDFTFTISTLQAEDLAVYFCQQDYNSPPTFGGGTKLEIKRTTTPAPRPPTPAPTIASQPLSLRPEACRPAAGGAVHTRGLDFACDIYIWAPLAGTCGVLLLSLVITLYCKRGRKKLLYIFKQPFMRPVQTTQEEDGCSCRFPEEEEGGCELRVKFSRSADAPAYQQGQNQLYNELNLGRREEYDVLDKRRGRDPEMGGKPRRKNPQEGLYNELQKDKMAEAYSEIGMKGERRRGKGHDGLYQGLSTATKDTYDALHMQALPPR

SEQ ID NO: 2513 - protein, 487 aa, Artificial Sequence
  source: /note="Description of Artificial Sequence: Synthetic Chimeric Antigen Receptor sequence"
MALPVTALLLPLALLLHAARPQIQLVQSGPELKKPGETVKISCKASGYTFTNFGMNWVKQGPGEGLKWMGWINTNTGEPRYAEEFKGRFAFSLETTASTAYLQINNLKNEDTATYFCARDWDGAYFFDYWGQGTTLTVSSGGGSGGGGSGGGGSSIVMTQTPKFLLVSAGDRVTITCKASQSVSNDVAWYQQKPGQSPKLLINFATNRYTGVPNRFTGSGYGTDFTFTISTVQAEDLALYFCQQDYSSPWTFGGGTKLEIKTTTPAPRPPTPAPTIASQPLSLRPEACRPAAGGAVHTRGLDFACDIISFFLALTSTALLFLLFFLTLRFSVVKRGRKKLLYIFKQPFMRPVQTTQEEDGCSCRFPEEEEGGCELRVKFSRSADAPAYQQGQNQLYNELNLGRREEYDVLDKRRGRDPEMGGKPRRKNPQEGLYNELQKDKMAEAYSEIGMKGERRRGKGHDGLYQGLSTATKDTYDALHMQALPPR

SEQ ID NO: 2514 - protein, 487 aa, Artificial Sequence
  source: /note="Description of Artificial Sequence: Synthetic Chimeric Antigen Receptor sequence"
MALPVTALLLPLALLLHAARPQVQLQQSRPELVKPGASVKMSCKASGYTFTDYVISWVKQRTGQGLEWIGEIYPGSNSIYYNEKFKGRATLTADKSSSTAYMQLSSLTSEDSAVYFCAMGGNYGFDYWGQGTTLTVSSGGGGSGGGGSGGGGSQIVLTQSPAIMSASLGERVTLTCTASSSVNSNYLHWYQQKPGSSPKLWIYSTSNLASGVPARFSGSGSGTSYSLTISSMEAEDAATYYCHQYHRSPLTFGAGTKLELKTTTPAPRPPTPAPTIASQPLSLRPEACRPAAGGAVHTRGLDFACDIISFFLALTSTALLFLLFFLTLRFSVVKRGRKKLLYIFKQPFMRPVQTTQEEDGCSCRFPEEEEGGCELRVKFSRSADAPAYQQGQNQLYNELNLGRREEYDVLDKRRGRDPEMGGKPRRKNPQEGLYNELQKDKMAEAYSEIGMKGERRRGKGHDGLYQGLSTATKDTYDALHMQALPPR

SEQ ID NO: 2515 - protein, 488 aa, Artificial Sequence
  source: /note="Description of Artificial Sequence: Synthetic Chimeric Antigen Receptor sequence"
MALPVTALLLPLALLLHAARPEVQLVESGGGLVQPKGSLKLSCAASGFTFNTYAMNWVRQAPGKGLEWVARIRSKSNNYATYYADSVKDRFTISRDDSQSMLYLQMNNLKTEDTAMYYCVRQWDYDVRAMNYWGQGTSVTVSSGGGGSGGGGSGGGGSDIVMTQSHIFMSTSVGDRVSITCKASQDVDTAVAWYQQKPGQSPKLLIYWASTRLTGVPDRFTGSGSGTDFTLTISNVQSEDLADYFCQQYSSYPYTFGGGTKLEIKTTTPAPRPPTPAPTIASQPLSLRPEACRPAAGGAVHTRGLDFACDIYIWAPLAGTCGVLLLSLVITLYCKRGRKKLLYIFKQPFMRPVQTTQEEDGCSCRFPEEEEGGCELRVKFSRSADAPAYQQGQNQLYNELNLGRREEYDVLDKRRGRDPEMGGKPRRKNPQEGLYNELQKDKMAEAYSEIGMKGERRRGKGHDGLYQGLSTATKDTYDALHMQALPPR

SEQ ID NO: 2516 - protein, 490 aa, Artificial Sequence
  source: /note="Description of Artificial Sequence: Synthetic Chimeric Antigen Receptor sequence"
MALPVTALLLPLALLLHAARPEVQLQQSGPDLVKPGASVKISCKASGYSFTGYYMHWVKQSHGKSLEWIGRINPNNGVTLYNQKFKDKAILTVDKSSTTAYMELRSLTSEDSAVYYCARSTMITNYVMDYWGQVTSVTVSSGGGGSGGGGSGGGGSSIVMTQTPTFLLVSAGDRVTITCKASQSVSNDVAWYQQKPGQSPTLLISYTSSRYAGVPDRFIGSGYGTDFTFTISTLQAEDLAVYFCQQDYNSPPTFGGGTKLEIKRTTTPAPRPPTPAPTIASQPLSLRPEACRPAAGGAVHTRGLDFACDIISFFLALTSTALLFLLFFLTLRFSVVKRGRKKLLYIFKQPFMRPVQTTQEEDGCSCRFPEEEEGGCELRVKFSRSADAPAYQQGQNQLYNELNLGRREEYDVLDKRRGRDPEMGGKPRRKNPQEGLYNELQKDKMAEAYSEIGMKGERRRGKGHDGLYQGLSTATKDTYDALHMQALPPR

SEQ ID NO: 2517 - protein, 491 aa, Artificial Sequence
  source: /note="Description of Artificial Sequence: Synthetic Chimeric Antigen Receptor sequence"
MALPVTALLLPLALLLHAARPEVQLVESGGGLVQPKGSLKLSCAASGFTFNTYAMNWVRQAPGKGLEWVARIRSKSNNYATYYADSVKDRFTISRDDSQSMLYLQMNNLKTEDTAMYYCVRQWDYDVRAMNYWGQGTSVTVSSGGGGSGGGGSGGGGSDIVMTQSHIFMSTSVGDRVSITCKASQDVDTAVAWYQQKPGQSPKLLIYWASTRLTGVPDRFTGSGSGTDFTLTISNVQSEDLADYFCQQYSSYPYTFGGGTKLEIKTTTPAPRPPTPAPTIASQPLSLRPEACRPAAGGAVHTRGLDFACDIISFFLALTSTALLFLLFFLTLRFSVVKRGRKKLLYIFKQPFMRPVQTTQEEDGCSCRFPEEEEGGCELRVKFSRSADAPAYQQGQNQLYNELNLGRREEYDVLDKRRGRDPEMGGKPRRKNPQEGLYNELQKDKMAEAYSEIGMKGERRRGKGHDGLYQGLSTATKDTYDALHMQALPPR

SEQ ID NO: 2518 - protein, 670 aa, Artificial Sequence
  source: /note="Description of Artificial Sequence: Synthetic Chimeric Antigen Receptor sequence"
MALPVTALLLPLALLLHAARPQIQLVQSGPELKKPGETVKISCKASGYTFTNFGMNWVKQGPGEGLKWMGWINTNTGEPRYAEEFKGRFAFSLETTASTAYLQINNLKNEDTATYFCARDWDGAYFFDYWGQGTTLTVSSGGGSGGGGSGGGGSSIVMTQTPKFLLVSAGDRVTITCKASQSVSNDVAWYQQKPGQSPKLLINFATNRYTGVPNRFTGSGYGTDFTFTISTVQAEDLALYFCQQDYSSPWTFGGGTKLEIKEPKSPDKTHTCPPCPAPPVAGPSVFLFPPKPKDTLMIARTPEVTCVVVDVSHEDPEVKFNWYVDGVEVHNAKTKPREEQYNSTYRVVSVLTVLHQDWLNGKEYKCKVSNKALPAPIEKTISKAKGQPREPQVYTLPPSRDELTKNQVSLTCLVKGFYPSDIAVEWESNGQPENNYKTTPPVLDSDGSFFLYSKLTVDKSRWQQGNVFSCSVMHEALHNHYTQKSLSLSPGKIYIWAPLAGTCGVLLLSLVITLYCKRGRKKLLYIFKQPFMRPVQTTQEEDGCSCRFPEEEEGGCELRVKFSRSADAPAYQQGQNQLYNELNLGRREEYDVLDKRRGRDPEMGGKPRRKNPQEGLYNELQKDKMAEAYSEIGMKGERRRGKGHDGLYQGLSTATKDTYDALHMQALPPR

SEQ ID NO: 2519 - protein, 670 aa, Artificial Sequence
  source: /note="Description of Artificial Sequence: Synthetic Chimeric Antigen Receptor sequence"
MALPVTALLLPLALLLHAARPQVQLQQSRPELVKPGASVKMSCKASGYTFTDYVISWVKQRTGQGLEWIGEIYPGSNSIYYNEKFKGRATLTADKSSSTAYMQLSSLTSEDSAVYFCAMGGNYGFDYWGQGTTLTVSSGGGGSGGGGSGGGGSQIVLTQSPAIMSASLGERVTLTCTASSSVNSNYLHWYQQKPGSSPKLWIYSTSNLASGVPARFSGSGSGTSYSLTISSMEAEDAATYYCHQYHRSPLTFGAGTKLELKEPKSPDKTHTCPPCPAPPVAGPSVFLFPPKPKDTLMIARTPEVTCVVVDVSHEDPEVKFNWYVDGVEVHNAKTKPREEQYNSTYRVVSVLTVLHQDWLNGKEYKCKVSNKALPAPIEKTISKAKGQPREPQVYTLPPSRDELTKNQVSLTCLVKGFYPSDIAVEWESNGQPENNYKTTPPVLDSDGSFFLYSKLTVDKSRWQQGNVFSCSVMHEALHNHYTQKSLSLSPGKIYIWAPLAGTCGVLLLSLVITLYCKRGRKKLLYIFKQPFMRPVQTTQEEDGCSCRFPEEEEGGCELRVKFSRSADAPAYQQGQNQLYNELNLGRREEYDVLDKRRGRDPEMGGKPRRKNPQEGLYNELQKDKMAEAYSEIGMKGERRRGKGHDGLYQGLSTATKDTYDALHMQALPPR

SEQ ID NO: 2520 - protein, 673 aa, Artificial Sequence
  source: /note="Description of Artificial Sequence: Synthetic Chimeric Antigen Receptor sequence"
MALPVTALLLPLALLLHAARPQIQLVQSGPELKKPGETVKISCKASGYTFTNFGMNWVKQGPGEGLKWMGWINTNTGEPRYAEEFKGRFAFSLETTASTAYLQINNLKNEDTATYFCARDWDGAYFFDYWGQGTTLTVSSGGGSGGGGSGGGGSSIVMTQTPKFLLVSAGDRVTITCKASQSVSNDVAWYQQKPGQSPKLLINFATNRYTGVPNRFTGSGYGTDFTFTISTVQAEDLALYFCQQDYSSPWTFGGGTKLEIKEPKSPDKTHTCPPCPAPPVAGPSVFLFPPKPKDTLMIARTPEVTCVVVDVSHEDPEVKFNWYVDGVEVHNAKTKPREEQYNSTYRVVSVLTVLHQDWLNGKEYKCKVSNKALPAPIEKTISKAKGQPREPQVYTLPPSRDELTKNQVSLTCLVKGFYPSDIAVEWESNGQPENNYKTTPPVLDSDGSFFLYSKLTVDKSRWQQGNVFSCSVMHEALHNHYTQKSLSLSPGKIISFFLALTSTALLFLLFFLTLRFSVVKRGRKKLLYIFKQPFMRPVQTTQEEDGCSCRFPEEEEGGCELRVKFSRSADAPAYQQGQNQLYNELNLGRREEYDVLDKRRGRDPEMGGKPRRKNPQEGLYNELQKDKMAEAYSEIGMKGERRRGKGHDGLYQGLSTATKDTYDALHMQALPPR

SEQ ID NO: 2521 - protein, 673 aa, Artificial Sequence
  source: /note="Description of Artificial Sequence: Synthetic Chimeric Antigen Receptor sequence"
MALPVTALLLPLALLLHAARPQVQLQQSRPELVKPGASVKMSCKASGYTFTDYVISWVKQRTGQGLEWIGEIYPGSNSIYYNEKFKGRATLTADKSSSTAYMQLSSLTSEDSAVYFCAMGGNYGFDYWGQGTTLTVSSGGGGSGGGGSGGGGSQIVLTQSPAIMSASLGERVTLTCTASSSVNSNYLHWYQQKPGSSPKLWIYSTSNLASGVPARFSGSGSGTSYSLTISSMEAEDAATYYCHQYHRSPLTFGAGTKLELKEPKSPDKTHTCPPCPAPPVAGPSVFLFPPKPKDTLMIARTPEVTCVVVDVSHEDPEVKFNWYVDGVEVHNAKTKPREEQYNSTYRVVSVLTVLHQDWLNGKEYKCKVSNKALPAPIEKTISKAKGQPREPQVYTLPPSRDELTKNQVSLTCLVKGFYPSDIAVEWESNGQPENNYKTTPPVLDSDGSFFLYSKLTVDKSRWQQGNVFSCSVMHEALHNHYTQKSLSLSPGKIISFFLALTSTALLFLLFFLTLRFSVVKRGRKKLLYIFKQPFMRPVQTTQEEDGCSCRFPEEEEGGCELRVKFSRSADAPAYQQGQNQLYNELNLGRREEYDVLDKRRGRDPEMGGKPRRKNPQEGLYNELQKDKMAEAYSEIGMKGERRRGKGHDGLYQGLSTATKDTYDALHMQALPPR

SEQ ID NO: 2522 - protein, 674 aa, Artificial Sequence
  source: /note="Description of Artificial Sequence: Synthetic Chimeric Antigen Receptor sequence"
MALPVTALLLPLALLLHAARPEVQLVESGGGLVQPKGSLKLSCAASGFTFNTYAMNWVRQAPGKGLEWVARIRSKSNNYATYYADSVKDRFTISRDDSQSMLYLQMNNLKTEDTAMYYCVRQWDYDVRAMNYWGQGTSVTVSSGGGGSGGGGSGGGGSDIVMTQSHIFMSTSVGDRVSITCKASQDVDTAVAWYQQKPGQSPKLLIYWASTRLTGVPDRFTGSGSGTDFTLTISNVQSEDLADYFCQQYSSYPYTFGGGTKLEIKEPKSPDKTHTCPPCPAPPVAGPSVFLFPPKPKDTLMIARTPEVTCVVVDVSHEDPEVKFNWYVDGVEVHNAKTKPREEQYNSTYRVVSVLTVLHQDWLNGKEYKCKVSNKALPAPIEKTISKAKGQPREPQVYTLPPSRDELTKNQVSLTCLVKGFYPSDIAVEWESNGQPENNYKTTPPVLDSDGSFFLYSKLTVDKSRWQQGNVFSCSVMHEALHNHYTQKSLSLSPGKIYIWAPLAGTCGVLLLSLVITLYCKRGRKKLLYIFKQPFMRPVQTTQEEDGCSCRFPEEEEGGCELRVKFSRSADAPAYQQGQNQLYNELNLGRREEYDVLDKRRGRDPEMGGKPRRKNPQEGLYNELQKDKMAEAYSEIGMKGERRRGKGHDGLYQGLSTATKDTYDALHMQALPPR

SEQ ID NO: 2523 - protein, 676 aa, Artificial Sequence
  source: /note="Description of Artificial Sequence: Synthetic Chimeric Antigen Receptor sequence"
MALPVTALLLPLALLLHAARPEVQLQQSGPDLVKPGASVKISCKASGYSFTGYYMHWVKQSHGKSLEWIGRINPNNGVTLYNQKFKDKAILTVDKSSTTAYMELRSLTSEDSAVYYCARSTMITNYVMDYWGQVTSVTVSSGGGGSGGGGSGGGGSSIVMTQTPTFLLVSAGDRVTITCKASQSVSNDVAWYQQKPGQSPTLLISYTSSRYAGVPDRFIGSGYGTDFTFTISTLQAEDLAVYFCQQDYNSPPTFGGGTKLEIKREPKSPDKTHTCPPCPAPPVAGPSVFLFPPKPKDTLMIARTPEVTCVVVDVSHEDPEVKFNWYVDGVEVHNAKTKPREEQYNSTYRVVSVLTVLHQDWLNGKEYKCKVSNKALPAPIEKTISKAKGQPREPQVYTLPPSRDELTKNQVSLTCLVKGFYPSDIAVEWESNGQPENNYKTTPPVLDSDGSFFLYSKLTVDKSRWQQGNVFSCSVMHEALHNHYTQKSLSLSPGKIISFFLALTSTALLFLLFFLTLRFSVVKRGRKKLLYIFKQPFMRPVQTTQEEDGCSCRFPEEEEGGCELRVKFSRSADAPAYQQGQNQLYNELNLGRREEYDVLDKRRGRDPEMGGKPRRKNPQEGLYNELQKDKMAEAYSEIGMKGERRRGKGHDGLYQGLSTATKDTYDALHMQALPPR

SEQ ID NO: 2524 - protein, 677 aa, Artificial Sequence
  source: /note="Description of Artificial Sequence: Synthetic Chimeric Antigen Receptor sequence"
MALPVTALLLPLALLLHAARPEVQLVESGGGLVQPKGSLKLSCAASGFTFNTYAMNWVRQAPGKGLEWVARIRSKSNNYATYYADSVKDRFTISRDDSQSMLYLQMNNLKTEDTAMYYCVRQWDYDVRAMNYWGQGTSVTVSSGGGGSGGGGSGGGGSDIVMTQSHIFMSTSVGDRVSITCKASQDVDTAVAWYQQKPGQSPKLLIYWASTRLTGVPDRFTGSGSGTDFTLTISNVQSEDLADYFCQQYSSYPYTFGGGTKLEIKEPKSPDKTHTCPPCPAPPVAGPSVFLFPPKPKDTLMIARTPEVTCVVVDVSHEDPEVKFNWYVDGVEVHNAKTKPREEQYNSTYRVVSVLTVLHQDWLNGKEYKCKVSNKALPAPIEKTISKAKGQPREPQVYTLPPSRDELTKNQVSLTCLVKGFYPSDIAVEWESNGQPENNYKTTPPVLDSDGSFFLYSKLTVDKSRWQQGNVFSCSVMHEALHNHYTQKSLSLSPGKIISFFLALTSTALLFLLFFLTLRFSVVKRGRKKLLYIFKQPFMRPVQTTQEEDGCSCRFPEEEEGGCELRVKFSRSADAPAYQQGQNQLYNELNLGRREEYDVLDKRRGRDPEMGGKPRRKNPQEGLYNELQKDKMAEAYSEIGMKGERRRGKGHDGLYQGLSTATKDTYDALHMQALPPR

SEQ ID NO: 2525 - protein, 468 aa, Artificial Sequence
  source: /note="Description of Artificial Sequence: Synthetic Chimeric Antigen Receptor sequence"
QVTLKESGPGILKPSQTLSLTCSFSGFSLSTSGMGVGWIRQPSGKGLEWLAHIWWDDDKYYNPSLKSQLTISKDTSRNQVFLKITSVDTADTATYYCSRRPRGTMDAMDYWGQGTSVTVSSGGGGSGGGGSGGGGSDIVMTQAASSLSASLGDRVTISCRASQDISKYLNWYQQKPDGTVKLLIYYTSRLHSGVPSRFSGSGSGTDYSLTIRNLEQEDIATYFCQQVYTLPWTFGGGTKLEIKSGTTTPAPRPPTPAPTIASQPLSLRPEACRPAAGGAVHTRGLDFACDIYIWAPLAGTCGVLLLSLVITLYCKRGRKKLLYIFKQPFMRPVQTTQEEDGCSCRFPEEEEGGCELRVKFSRSADAPAYKQGQNQLYNELNLGRREEYDVLDKRRGRDPEMGGKPRRKNPQEGLYNELQKDKMAEAYSEIGMKGERRRGKGHDGLYQGLSTATKDTYDALHMQALPPR

SEQ ID NO: 2526 - protein, 470 aa, Artificial Sequence
  source: /note="Description of Artificial Sequence: Synthetic Chimeric Antigen Receptor sequence"
QVTLKESGPGILKPSQTLSLTCSFSGFSLNTSGMGVGWIRQPSGKGLEWLAHIWWDDDKYYNPSLKSQLTISKDTSRNQVFLKITSVDTADSATYYCARRASHVSTVDSFDFWGQGTTLTVSSGGGGSGGGGSGGGGSDIQMTQTTSSLSASLGDRVTISCRASQDISNYLNWFQQKPDGTVKLLIYYTSRLHSGVPSKFSGSGSGTDYSLTISNLEQEDIATYFCQQGYTLPWTFGGGTKLEIKSGTTTPAPRPPTPAPTIASQPLSLRPEACRPAAGGAVHTRGLDFACDIYIWAPLAGTCGVLLLSLVITLYCKRGRKKLLYIFKQPFMRPVQTTQEEDGCSCRFPEEEEGGCELRVKFSRSADAPAYKQGQNQLYNELNLGRREEYDVLDKRRGRDPEMGGKPRRKNPQEGLYNELQKDKMAEAYSEIGMKGERRRGKGHDGLYQGLSTATKDTYDALHMQALPPR

SEQ ID NO: 2527 - protein, 491 aa, Artificial Sequence
  source: /note="Description of Artificial Sequence: Synthetic Chimeric Antigen Receptor sequence"
MALPVTALLLPLALLLHAARPQVTLKESGPGILKPSQTLSLTCSFSGFSLNTSGMGVGWIRQPSGKGLEWLAHIWWDDDKYYNPSLKSQLTISKDTSRNQVFLKITSVDTADSATYYCARRASHVSTVDSFDFWGQGTTLTVSSGGGGSGGGGSGGGGSDIQMTQTTSSLSASLGDRVTISCRASQDISNYLNWFQQKPDGTVKLLIYYTSRLHSGVPSKFSGSGSGTDYSLTISNLEQEDIATYFCQQGYTLPWTFGGGTKLEIKSGTTTPAPRPPTPAPTIASQPLSLRPEACRPAAGGAVHTRGLDFACDIYIWAPLAGTCGVLLLSLVITLYCKRGRKKLLYIFKQPFMRPVQTTQEEDGCSCRFPEEEEGGCELRVKFSRSADAPAYKQGQNQLYNELNLGRREEYDVLDKRRGRDPEMGGKPRRKNPQEGLYNELQKDKMAEAYSEIGMKGERRRGKGHDGLYQGLSTATKDTYDALHMQALPPR

SEQ ID NO: 2528 - protein, 546 aa, Artificial Sequence
  source: /note="Description of Artificial Sequence: Synthetic Chimeric Antigen Receptor sequence"
MDFQVQIFSFLLISASVIMSRGDIQMTQSPSSVSASIGDRVTITCRASQGIDNWLGWYQQKPGKAPKLLIYDASNLDTGVPSRFSGSGSGTYFTLTISSLQAEDFAVYFCQQAKAFPPTFGGGTKVDIKGSTSGSGKPGSGEGSEVQLVQSGGGLVKPGGSLRLSCAASGFTFSSYSMNWVRQAPGKGLEWVSSISSSSSYIYYADSVKGRFTISRDNAKNSLYLQMNSLRAEDTAVYYCARVTDAFDIWGQGTMVTVSSAAAFVPVFLPAKPTTTPAPRPPTPAPTIASQPLSLRPEACRPAAGGAVHTRGLDFACDIYIWAPLAGTCGVLLLSLVITLYCNHRNRSKRSRLLHSDYMNMTPRRPGPTRKHYQPYAPPRDFAAYRSRFSVVKRGRKKLLYIFKQPFMRPVQTTQEEDGCSCRFPEEEEGGCELRVKFSRSADAPAYQQGQNQLYNELNLGRREEYDVLDKRRGRDPEMGGKPRRKNPQEGLYNELQKDKMAEAYSEIGMKGERRRGKGHDGLYQGLSTATKDTYDALHMQALPPR

SEQ ID NO: 2529 - protein, 709 aa, Artificial Sequence
  source: /note="Description of Artificial Sequence: Synthetic Chimeric Antigen Receptor sequence"
QVTLKESGPGILKPSQTLSLTCSFSGFSLSTSGMGVGWIRQPSGKGLEWLAHIWWDDDKYYNPSLKSQLTISKDTSRNQVFLKITSVDTADTATYYCSRRPRGTMDAMDYWGQGTSVTVSSGGGGSGGGGSGGGGSDIVMTQAASSLSASLGDRVTISCRASQDISKYLNWYQQKPDGTVKLLIYYTSRLHSGVPSRFSGSGSGTDYSLTIRNLEQEDIATYFCQQVYTLPWTFGGGTKLEIKLEDPAEPKSPDKTHTCPPCPAPELLGGPSVFLFPPKPKDTLMISRTPEVTCVVVDVSHEDPEVKFNWYVDGVEVHNAKTKPREEQYNSTYRVVSVLTVLHQDWLNGKEYKCKVSNKALPAPIEKTISKAKGQPREPQVYTLPPSRDELTKNQVSLTCLVKGFYPSDIAVEWESNGQPENNYKTTPPVLDSDGSFFLYSKLTVDKSRWQQGNVFSCSVMHEALHNHYTQKSLSLSPGKKDPKSGTTTPAPRPPTPAPTIASQPLSLRPEACRPAAGGAVHTRGLDFACDIYIWAPLAGTCGVLLLSLVITLYCKRGRKKLLYIFKQPFMRPVQTTQEEDGCSCRFPEEEEGGCELRVKFSRSADAPAYKQGQNQLYNELNLGRREEYDVLDKRRGRDPEMGGKPRRKNPQEGLYNELQKDKMAEAYSEIGMKGERRRGKGHDGLYQGLSTATKDTYDALHMQALPPR

SEQ ID NO: 2530 - protein, 711 aa, Artificial Sequence
  source: /note="Description of Artificial Sequence: Synthetic Chimeric Antigen Receptor sequence"
QVTLKESGPGILKPSQTLSLTCSFSGFSLNTSGMGVGWIRQPSGKGLEWLAHIWWDDDKYYNPSLKSQLTISKDTSRNQVFLKITSVDTADSATYYCARRASHVSTVDSFDFWGQGTTLTVSSGGGGSGGGGSGGGGSDIQMTQTTSSLSASLGDRVTISCRASQDISNYLNWFQQKPDGTVKLLIYYTSRLHSGVPSKFSGSGSGTDYSLTISNLEQEDIATYFCQQGYTLPWTFGGGTKLEIKLEDPAEPKSPDKTHTCPPCPAPELLGGPSVFLFPPKPKDTLMISRTPEVTCVVVDVSHEDPEVKFNWYVDGVEVHNAKTKPREEQYNSTYRVVSVLTVLHQDWLNGKEYKCKVSNKALPAPIEKTISKAKGQPREPQVYTLPPSRDELTKNQVSLTCLVKGFYPSDIAVEWESNGQPENNYKTTPPVLDSDGSFFLYSKLTVDKSRWQQGNVFSCSVMHEALHNHYTQKSLSLSPGKKDPKSGTTTPAPRPPTPAPTIASQPLSLRPEACRPAAGGAVHTRGLDFACDIYIWAPLAGTCGVLLLSLVITLYCKRGRKKLLYIFKQPFMRPVQTTQEEDGCSCRFPEEEEGGCELRVKFSRSADAPAYKQGQNQLYNELNLGRREEYDVLDKRRGRDPEMGGKPRRKNPQEGLYNELQKDKMAEAYSEIGMKGERRRGKGHDGLYQGLSTATKDTYDALHMQALPPR

SEQ ID NO: 2531 - protein, 730 aa, Artificial Sequence
  source: /note="Description of Artificial Sequence: Synthetic Chimeric Antigen Receptor sequence"
MALPVTALLLPLALLLHAARPQVTLKESGPGILKPSQTLSLTCSFSGFSLSTSGMGVGWIRQPSGKGLEWLAHIWWDDDKYYNPSLKSQLTISKDTSRNQVFLKITSVDTADTATYYCSRRPRGTMDAMDYWGQGTSVTVSSGGGGSGGGGSGGGGSDIVMTQAASSLSASLGDRVTISCRASQDISKYLNWYQQKPDGTVKLLIYYTSRLHSGVPSRFSGSGSGTDYSLTIRNLEQEDIATYFCQQVYTLPWTFGGGTKLEIKLEDPAEPKSPDKTHTCPPCPAPELLGGPSVFLFPPKPKDTLMISRTPEVTCVVVDVSHEDPEVKFNWYVDGVEVHNAKTKPREEQYNSTYRVVSVLTVLHQDWLNGKEYKCKVSNKALPAPIEKTISKAKGQPREPQVYTLPPSRDELTKNQVSLTCLVKGFYPSDIAVEWESNGQPENNYKTTPPVLDSDGSFFLYSKLTVDKSRWQQGNVFSCSVMHEALHNHYTQKSLSLSPGKKDPKSGTTTPAPRPPTPAPTIASQPLSLRPEACRPAAGGAVHTRGLDFACDIYIWAPLAGTCGVLLLSLVITLYCKRGRKKLLYIFKQPFMRPVQTTQEEDGCSCRFPEEEEGGCELRVKFSRSADAPAYKQGQNQLYNELNLGRREEYDVLDKRRGRDPEMGGKPRRKNPQEGLYNELQKDKMAEAYSEIGMKGERRRGKGHDGLYQGLSTATKDTYDALHMQALPPR

SEQ ID NO: 2532 - protein, 732 aa, Artificial Sequence
  source: /note="Description of Artificial Sequence: Synthetic Chimeric Antigen Receptor sequence"
MALPVTALLLPLALLLHAARPQVTLKESGPGILKPSQTLSLTCSFSGFSLNTSGMGVGWIRQPSGKGLEWLAHIWWDDDKYYNPSLKSQLTISKDTSRNQVFLKITSVDTADSATYYCARRASHVSTVDSFDFWGQGTTLTVSSGGGGSGGGGSGGGGSDIQMTQTTSSLSASLGDRVTISCRASQDISNYLNWFQQKPDGTVKLLIYYTSRLHSGVPSKFSGSGSGTDYSLTISNLEQEDIATYFCQQGYTLPWTFGGGTKLEIKLEDPAEPKSPDKTHTCPPCPAPELLGGPSVFLFPPKPKDTLMISRTPEVTCVVVDVSHEDPEVKFNWYVDGVEVHNAKTKPREEQYNSTYRVVSVLTVLHQDWLNGKEYKCKVSNKALPAPIEKTISKAKGQPREPQVYTLPPSRDELTKNQVSLTCLVKGFYPSDIAVEWESNGQPENNYKTTPPVLDSDGSFFLYSKLTVDKSRWQQGNVFSCSVMHEALHNHYTQKSLSLSPGKKDPKSGTTTPAPRPPTPAPTIASQPLSLRPEACRPAAGGAVHTRGLDFACDIYIWAPLAGTCGVLLLSLVITLYCKRGRKKLLYIFKQPFMRPVQTTQEEDGCSCRFPEEEEGGCELRVKFSRSADAPAYKQGQNQLYNELNLGRREEYDVLDKRRGRDPEMGGKPRRKNPQEGLYNELQKDKMAEAYSEIGMKGERRRGKGHDGLYQGLSTATKDTYDALHMQALPPR

SEQ ID NO: 2533 - protein, 726 aa, Artificial Sequence
  source: /note="Description of Artificial Sequence: Synthetic Chimeric Antigen Receptor sequence"
LLVTSLLLCELPHPAFLLIPDTDVKLQESGPGLVAPSQSLSITCTVSGFSLTSYAVSWVRQPPGKGLEWLGIIWSGGATNYNSALKSRLSISKDNSKSQVFLKMNGLQTDDTARYYCAREHYYGSSAMDYWGQGASITVSSGGGGSGGGGSGGGGSGIVMTQSPLSLPVSLGDQASISCRSSQSIVHSYGNTYLFWYLQKPGQSPKLLIYRVSNRFSGVPDRFSGSGSGTNFTLKISRVEAEDMGVYYCFQGTHVPYTFGGGTKLEIKEPKSCDKTHTCPPCPAPELLGGPSVFLFPPKPKDTLMISRTPEVTCVVVDVSHEDPEVKFNWYVDGVEVHNAKTKPREEQYNSTYRVVSVLTVLHQDWLNGKEYKCKVSNKALPAPIEKTISKAKGQPREPQVYTLPPSRDELTKNQVSLTCLVKGFYPSDIAVEWESNGQPENNYKTTPPVLDSDGSFFLYSKLTVDKSRWQQGNVFSCSVMHEALHNHYTQKSLSLSPGKKDPKAAAIEVMYPPPYLDNEKSNGTIIHVKGKHLCPSPLFPGPSKPFWVLVVVGGVLACYSLLVTVAFIIFWVRSKRSRLLHSDYMNMTPRRPGPTRKHYQPYAPPRDFAAYRSRVKFSRSADAPAYQQGQNQLYNELNLGRREEYDVLDKRRGRDPEMGGKPRRKNPQEGLYNELQKDKMAEAYSEIGMKGERRRGKGHDGLYQGLSTATKDTYDALHMQALPPR

SEQ ID NO: 2534 - protein, 481 aa, Artificial Sequence
  source: /note="Description of Artificial Sequence: Synthetic Chimeric Antigen Receptor sequence"
MDFQVQIFSFLLISASVIMSRGDIQMTQSPSSVSASIGDRVTITCRASQGIDNWLGWYQQKPGKAPKLLIYDASNLDTGVPSRFSGSGSGTYFTLTISSLQAEDFAVYFCQQAKAFPPTFGGGTKVDIKGSTSGSGKPGSGEGSEVQLVQSGGGLVKPGGSLRLSCAASGFTFSSYSMNWVRQAPGKGLEWVSSISSSSSYIYYADSVKGRFTISRDNAKNSLYLQMNSLRAEDTAVYYCARVTDAFDIWGQGTMVTVSSAAAIEVMYPPPYLDNEKSNGTIIHVKGKHLCPSPLFPGPSKPFWVLVVVGGVLACYSLLVTVAFIIFWRSKRSRLLHSDYMNMTPRRPGPTRKHYQPYAPPRDFAAYRSRVKFSRSADAPAYQQGQNQLYNELNLGRREEYDVLDKRRGRDPEMGGKPRRKNPQEGLYNELQKDKMAEAYSEIGMKGERRRGKGHDGLYQGLSTATKDTYDALHMQALPPR

SEQ ID NO: 2535 - protein, 487 aa, Artificial Sequence
  source: /note="Description of Artificial Sequence: Synthetic Chimeric Antigen Receptor sequence"
MGWSCIILFLVATATGVHSEVQLVETGGGLVQPGNSLKLSCATSGFIFSTTWMNWIRQTPGKRLEWLAQIEDKSNNYFISYSESVKGRFTISRDDSKSSVYLQMNNLKEEDTAIYYCSWKYRSNYYFDYWGQGVMVTVSSGSTSGSGKPGSGEGSDIVLTQSPALAVSLEQRATISCKTSQNVDYYGISYLHWYQQKPGQQPKLLIYEGSNLASGIPARFSGSGSGTDFTLTIDPVEADDIVTYYCQQSKDYPYTFGAGTKLELKAAAIEVMYPPPYLDNEKSNGTIIHVKGKHLCPSPLFPGPSKPFWVLVVVGGVLACYSLLVTVAFIIFWVRSKRSRLLHSDYMNMTPRRPGPTRKHYQPYAPPRDFAAYRSRVKFSRSADAPAYQQGQNQLYNELNLGRREEYDVLDKRRGRDPEMGGKPRRKNPQEGLYNELQKDKMAEAYSEIGMKGERRRGKGHDGLYQGLSTATKDTYDALHMQALPPR

SEQ ID NO: 2536 - protein, 494 aa, Artificial Sequence
  source: /note="Description of Artificial Sequence: Synthetic Chimeric Antigen Receptor sequence"
MGWSCIILFLVATATGVHSEVQLVETGGGLVQPGNSLKLSCATSGFIFSTTWMNWIRQTPGKRLEWLAQIEDKSNNYFISYSESVKGRFTISRDDSKSSVYLQMNNLKEEDTAIYYCSWKYRSNYYFDYWGQGVMVTVSSGSTSGSGKPGSGEGSDIVLTQSPALAVSLEQRATISCKTSQNVDYYGISYLHWYQQKPGQQPKLLIYEGSNLASGIPARFSGSGSGTDFTLTIDPVEADDIVTYYCQQSKDYPYTFGAGTKLELKAAATTTKPVLRTPSPVHPTGTSQPQRPEDCRPRGSVKGTGLDFACDIYIWAPLAGICVALLLSLIITLICYHRSRNSRRNRLLQVTTMNMTPRRPGLTRKPYQPYAPARDFAAYRPRAKFSRSAETAANLQDPNQLYNELNLGRREEYDVLEKKRARDPEMGGKQQRRRNPQEGVYNALQKDKMAEAYSEIGTKGERRRGKGHDGLYQGLSTATKDTYDALHMQTLAPR

SEQ ID NO: 2537 - protein, 539 aa, Artificial Sequence
  source: /note="Description of Artificial Sequence: Synthetic Chimeric Antigen Receptor sequence"
MGWSCIILFLVATATGVHSEVQLVETGGGLVQPGNSLKLSCATSGFIFSTTWMNWIRQTPGKRLEWLAQIEDKSNNYFISYSESVKGRFTISRDDSKSSVYLQMNNLKEEDTAIYYCSWKYRSNYYFDYWGQGVMVTVSSGSTSGSGKPGSGEGSDIVLTQSPALAVSLEQRATISCKTSQNVDYYGISYLHWYQQKPGQQPKLLIYEGSNLASGIPARFSGSGSGTDFTLTIDPVEADDIVTYYCQQSKDYPYTFGAGTKLELKAAATTTKPVLRTPSPVHPTGTSQPQRPEDCRPRGSVKGTGLDFACDIYIWAPLAGICVALLLSLIITLICYHRSRNSRRNRLLQVTTMNMTPRRPGLTRKPYQPYAPARDFAAYRPKWIRKKFPHIFKQPFKKTTGAAQEEDACSCRCPQEEEGGGGGYELRAKFSRSAETAANLQDPNQLYNELNLGRREEYDVLEKKRARDPEMGGKQQRRRNPQEGVYNALQKDKMAEAYSEIGTKGERRRGKGHDGLYQGLSTATKDTYDALHMQTLAPR

SEQ ID NO: 2538 - protein, 551 aa, Artificial Sequence
  source: /note="Description of Artificial Sequence: Synthetic Chimeric Antigen Receptor sequence"
MGWSCIILFLVATATGVHSEVQLVETGGGLVQPGNSLKLSCATSGFIFSTTWMNWIRQTPGKRLEWLAQIEDKSNNYFISYSESVKGRFTISRDDSKSSVYLQMNNLKEEDTAIYYCSWKYRSNYYFDYWGQGVMVTVSSGSTSGSGKPGSGEGSDIVLTQSPALAVSLEQRATISCKTSQNVDYYGISYLHWYQQKPGQQPKLLIYEGSNLASGIPARFSGSGSGTDFTLTIDPVEADDIVTYYCQQSKDYPYTFGAGTKLELKAAAFVPVFLPAKPTTTPAPRPPTPAPTIASQPLSLRPEACRPAAGGAVHTRGLDFACDIYIWAPLAGTCGVLLLSLVITLYCNHRNRSKRSRLLHSDYMNMTPRRPGPTRKHYQPYAPPRDFAAYRSRFSVVKRGRKKLLYIFKQPFMRPVQTTQEEDGCSCRFPEEEEGGCELRVKFSRSADAPAYQQGQNQLYNELNLGRREEYDVLDKRRGRDPEMGGKPRRKNPQEGLYNELQKDKMAEAYSEIGMKGERRRGKGHDGLYQGLSTATKDTYDALHMQALPPR

SEQ ID NO: 2539 - protein, 708 aa, Artificial Sequence [sequence omitted]

SEQ ID NO: 2540 - protein, 33 aa, Homo sapiens
MGLHLRPYRVGLLPDGLLFLLLLLMLLADPALP

SEQ ID NO: 2541 - protein, 24 aa, Homo sapiens
MSAPKLLSLGCIFFPLLLFQQARA

SEQ ID NO: 2542 - protein, 26 aa, Homo sapiens
MCPRAARAPATLLLALGAVLWPAAGA

SEQ ID NO: 2543 - protein, 18 aa, Homo sapiens
MKLSLVAAMLLLLSAARA

SEQ ID NO: 2544 - protein, 20 aa, Homo sapiens
MEPWPLLLLFSLCSAGLVLG

SEQ ID NO: 2545 - protein, 23 aa, Homo sapiens
MTPGALLMLLGALGAPLAPGVRG

SEQ ID NO: 2546 - protein, 20 aa, Homo sapiens
MARAPLGVLLLLGLLGRGVG

SEQ ID NO: 2547 - protein, 19 aa, Homo sapiens
MVEMLPTAILLVLAVSVVA

SEQ ID NO: 2548 - protein, 16 aa, Homo sapiens
MFRLWLLLAGLCGLLA

SEQ ID NO: 2549 - protein, 28 aa, Homo sapiens
MECCRRATPGTLLLFLAFLLLSSRTARS

SEQ ID NO: 2550 - protein, 18 aa, Homo sapiens
MLLLGAVLLLLALPGHDQ

SEQ ID NO: 2551 - protein, 21 aa, Artificial Sequence
  source: /note="Description of Artificial Sequence: Synthetic Signal Sequence"
MKLVSVALMYLGSLAFLGADT

SEQ ID NO: 2552 - protein, 16 aa, Homo sapiens
MTTLLWVFVTLRVITA

SEQ ID NO: 2553 - protein, 17 aa, Homo sapiens
MISPFLVLAIGTCLTNS

SEQ ID NO: 2554 - protein, 18 aa, Homo sapiens
MALSWVLTVLSLLPLLEA

SEQ ID NO: 2555 - protein, 23 aa, Homo sapiens
MERMLPLLALGLLAAGFCPAVLC

SEQ ID NO: 2556 - protein, 24 aa, Homo sapiens
MPSSVSWGILLLAGLCCLVPVSLA

SEQ ID NO: 2557 - protein, 21 aa, Homo sapiens
MSMLVVFLLLWGVTWGPVTEA

SEQ ID NO: 2558 - protein, 27 aa, Homo sapiens
MALLWGLLVLSWSCLQGPCSVFSPVSA

SEQ ID NO: 2559 - protein, 18 aa, Artificial Sequence
  source: /note="Description of Artificial Sequence: Synthetic Signal Sequence"
MKSLVLLLCLAQLWGCHS

SEQ ID NO: 2560 - protein, 23 aa, Homo sapiens
MGKNKLLHPSLVLLLLVLLPTDA

SEQ ID NO: 2561 - protein, 15 aa, Homo sapiens
MKFFLLLFTIGFCWA

SEQ ID NO: 2562 - protein, 18 aa, Homo sapiens
MKWVESIFLIFLLNFTES

SEQ ID NO: 2563 - protein, 31 aa, Homo sapiens
MQLRNPELHLGCALALRFLALVSWDIPGARA

SEQ ID NO: 2564 - protein, 19 aa, Homo sapiens
MRFFVPLFLVGILFPAILA

SEQ ID NO: 2565 - protein, 17 aa, Homo sapiens
MLLKTVLLLGHVAQVLM

SEQ ID NO: 2566 - protein, 23 aa, Homo sapiens
MEAVAVAAAVGVLLLAGAGGAAG

SEQ ID NO: 2567 - protein, 15 aa, Homo sapiens
MRLLILTCLVAVALA

SEQ ID NO: 2568 - protein, 23 aa, Homo sapiens
MGTSHPAFLVLGCLLTGLSLILC

SEQ ID NO: 2569 - protein, 16 aa, Homo sapiens
MGTWILFACLLGAAFA

SEQ ID NO: 2570 - protein, 16 aa, Homo sapiens
MRSTILLFCLLGSTRS

SEQ ID NO: 2571 - protein, 19 aa, Homo sapiens
MPALGWAVAAILMLQTAMA

SEQ ID NO: 2572 - protein, 17 aa, Homo sapiens
MLPGLALLLLAAWTARA

SEQ ID NO: 2573 - protein, 24 aa, Homo sapiens
MVMGLGVLLLVFVLGLGLTPPTLA

SEQ ID NO: 2574 - protein, 22 aa, Homo sapiens
MDSLASLVLCGVSLLLSGTVEG

SEQ ID NO: 2575 - protein, 16 aa, Homo sapiens
MFTIKLLLFIVPLVIS

SEQ ID NO: 2576 - protein, 26 aa, Homo sapiens
MLKKPLSAVTWLCIFIVAFVSHPAWL

SEQ ID NO: 2577 - protein, 31 aa, Homo sapiens
MGQGWATAGLPSLLFLLLCYGHPLLVPSQEA

SEQ ID NO: 2578 - protein, 33 aa, Homo sapiens
MRKRAPQSEMAPAGVSLRATILCLLAWAGLAAG

SEQ ID NO: 2579 - protein, 20 aa, Homo sapiens
MEKIPVSAFLLLVALSYTLA

SEQ ID NO: 2580 - protein, 21 aa, Homo sapiens
MMLHSALGLCLLLVTVSSNLA

SEQ ID NO: 2581 - protein, 25 aa, Artificial Sequence
  source: /note="Description of Artificial Sequence: Synthetic Signal Sequence"
MKSSGLFPFLVLLALGTLAPWAVEG

SEQ ID NO: 2582 - protein, 32 aa, Artificial Sequence
  source: /note="Description of Artificial Sequence: Synthetic polypeptide"
MYSNVIGTVTSGKRKVYLLSLLLIGFWDCVTC

SEQ ID NO: 2583 - protein, 18 aa, Homo sapiens
MKAAVLTLAVLFLTGSQA

SEQ ID NO: 2584 - protein, 18 aa, Homo sapiens
MKLLAATVLLLTICSLEG

SEQ ID NO: 2585 - protein, 20 aa, Homo sapiens
MFLKAVVLTLALVAVAGARA

SEQ ID NO: 2586 - protein, 27 aa, Homo sapiens
MDPPRPALLALLALPALLLLLLAGARA

SEQ ID NO: 2587 - protein, 22 aa, Homo sapiens
MGTRLLPALFLVLLVLGFEVQG

SEQ ID NO: 2588 - protein, 20 aa, Homo sapiens
MQPRVLLVVALLALLASARA

SEQ ID NO: 2589 - protein, 26 aa, Homo sapiens
MRLFLSLPVLVVVLSIVLEGPAPAQG

SEQ ID NO: 2590 - protein, 20 aa, Homo sapiens
MVMLLLLLSALAGLFGAAEG

SEQ ID NO: 2591 - protein, 18 aa, Homo sapiens
MKVLWAALLVTFLAGCQA

SEQ ID NO: 2592 - protein, 22 aa, Homo sapiens
MFHQIWAALLYFYGIILNSIYQ

SEQ ID NO: 2593 - protein, 19 aa, Homo sapiens
MEHKEVVLLLLLFLKSAAP

SEQ ID NO: 2594 - protein, 30 aa, Homo sapiens
MAPHGPGSLTTLVPWAAALLLALGVERALA

SEQ ID NO: 2595 - protein, 23 aa, Homo sapiens
MPSPGTVCSLLLLGMLWLDLAMA

SEQ ID NO: 2596 - protein, 18 aa, Homo sapiens
MGAPRSLLLALAAGLAVA

SEQ ID NO: 2597 - protein, 25 aa, Homo sapiens
MSSFSTTTVSFLLLLAFQLLGQTRA

SEQ ID NO: 2598 - protein, 32 aa, Homo sapiens
MPGPRRPAGSRLRLLLLLLLPPLLLLLRGSHA

SEQ ID NO: 2599 - protein, 26 aa, Homo sapiens
MTRLTVLALLAGLLASSRAGSSPLLD

SEQ ID NO: 2600 - protein, 31 aa, Homo sapiens
MRENMARGPCNAPRWVSLMVLVAIGTAVTAA

SEQ ID NO: 2601 - protein, 20 aa, Homo sapiens
MAWASRLGLLLALLLPVVGA

SEQ ID NO: 2602 - protein, 16 aa, Homo sapiens
MLLILLSVALLALSSA

SEQ ID NO: 2603 - protein, 21 aa, Homo sapiens
MAAALFVLLGFALLGTHGASG

SEQ ID NO: 2604 - protein, 32 aa, Homo sapiens
MPGGPGVLQALPATIFLLFLLSAVYLGPGCQA

SEQ ID NO: 2605 - protein, 28 aa, Homo sapiens
MARLALSPVPSHWMVALLLLLSAEPVPA

SEQ ID NO: 2606 - protein, 31 aa, Homo sapiens
MSSWIRWHGPAMARLWGFCWLVVGFWRAAFA

SEQ ID NO: 2607 - protein, 19 aa, Homo sapiens
MISPVLILFSSFLCHVAIA

SEQ ID NO: 2608 - protein, 20 aa, Homo sapiens
MSRSVALAVLALLSLSGLEA

SEQ ID NO: 2609 - protein, 15 aa, Homo sapiens
MKVLILACLVALALA

SEQ ID NO: 2610 - protein, 22 aa, Artificial Sequence
  source: /note="Description of Artificial Sequence: Synthetic peptide"
MRIHYLLFALLFLFLVPVPGHG

SEQ ID NO: 2611 - protein, 20 aa, Homo sapiens
MGLFMIIAILLFQKPTVTEQ

SEQ ID NO: 2612 - protein, 23 aa, Homo sapiens
MPGFLVRILLLLLVLLLLGPTRG

SEQ ID NO: 2613 - protein, 22 aa, Homo sapiens
MARGSAVAWAALGPLLWGCALG

SEQ ID NO: 2614 - protein, 22 aa, Homo sapiens
MTSSRLWFSLLLAAAFAGRATA

SEQ ID NO: 2615 - protein, 20 aa, Homo sapiens
MNVLLGSVVIFATFVTLCNA

SEQ ID NO: 2616 - protein, 20 aa, Homo sapiens
MAWQGLVLAACLLMFPSTTA

SEQ ID NO: 2617 - protein, 32 aa, Homo sapiens
MRLPGAMPALALKGELLLLSLLLLLEPQISQG

SEQ ID NO: 2618 - protein, 20 aa, Homo sapiens
MDRHSSYIFIWLQLELCAMA

SEQ ID NO: 2619 - protein, 16 aa, Homo sapiens
MKLPLLLALLFGAVSA

SEQ ID NO: 2620 - protein, 16 aa, Homo sapiens
MKTALILLSILGMACA

SEQ ID NO: 2621 - protein, 30 aa, Homo sapiens
MLRGTMTAWRGMRPEVTLACLLLATAGCFA

SEQ ID NO: 2622 - protein, 29 aa, Artificial Sequence
  source: /note="Description of Artificial Sequence: Synthetic Signal Sequence"
MKMASSLAFLLLNFHVSLFLVQLLTPCSA

SEQ ID NO: 2623 - protein, 17 aa, Homo sapiens
MALMLSLVLSLLKLGSG

SEQ ID NO: 2624 - protein, 25 aa, Homo sapiens
MAGPAIHTAPMLFLVLLLPLELSLA

SEQ ID NO: 2625 - protein, 48 aa, Homo sapiens
MHPPKTPSGALHRKRKMAAWPFSRLWKVSDPILFQMTLIAALLPAVLG

SEQ ID NO: 2626 - protein, 17 aa, Homo sapiens
MFFWCACCLMVAWRVSA

SEQ ID NO: 2627 - protein, 22 aa, Homo sapiens
MEKKCTLYFLVLLPFFMILVTA

SEQ ID NO: 2628 - protein, 24 aa, Homo sapiens
MRFTFTSRCLALFLLLNHPTPILP

SEQ ID NO: 2629 - protein, 29 aa, Homo sapiens
MEAPGPRALRTALCGGCCCLLLCAQLAVA

SEQ ID NO: 2630 - protein, 28 aa, Homo sapiens
MLRRPAPALAPAARLLLAGLLCGGGVWA

SEQ ID NO: 2631 - protein, 19 aa, Homo sapiens
MDLRQFLMCLSLCTAFALS

SEQ ID NO: 2632 - protein, 18 aa, Homo sapiens
MRMLLALLALSAARPSAS

SEQ ID NO: 2633 - protein, 37 aa, Homo sapiens
MAPLCPSPWLPLLIPAPAPGLTVQLLLSLLLLVPVHP

SEQ ID NO: 2634 - protein, 26 aa, Homo sapiens
MRLHRLRARLSAVACGLLLLLVRGQG

SEQ ID NO: 2635 - protein, 16 aa, Homo sapiens
MRGLLVLSVLLGAVFG

SEQ ID NO: 2636 - protein, 15 aa, Homo sapiens
MLALLVLVTVALASA

SEQ ID NO: 2637 - protein, 17 aa, Homo sapiens
MDFPCLWLGLLLPLVAA

SEQ ID NO: 2638 - protein, 20 aa, Homo sapiens
MSDLLSVFLHLLLLFKLVAP

SEQ ID NO: 2639 - protein, 34 aa, Homo sapiens
MGHLSAPLHRVRVPWQGLLLTASLLTFWNPPTTA

SEQ ID NO: 2640 - protein, 34 aa, Homo sapiens
MGPPSAPPCRLHVPWKEVLLTASLLTFWNPPTTA

SEQ ID NO: 2641 - protein, 35 aa, Homo sapiens
MGSPSACPYRVCIPWQGLLLTASLLTFWNLPNSAQ

SEQ ID NO: 2642 - protein, 34 aa, Homo sapiens
MGPISAPSCRWRIPWQGLLLTASLFTFWNPPTTA

SEQ ID NO: 2643 - protein, 22 aa, Homo sapiens
MRVLSGTSLMLCSLLLLLQALC

SEQ ID NO: 2644 - protein, 18 aa, Homo sapiens
MQPSSLLPLALCLLAAPA

SEQ ID NO: 2645 - protein, 19 aa, Homo sapiens
MKTLLLLLLVLLELGEAQG

SEQ ID NO: 2646 - protein, 18 aa, Homo sapiens
MQPLLLLLAFLLPTGAEA

SEQ ID NO: 2647 - protein, 22 aa, Homo sapiens
MWATLPLLCAGAWLLGVPVCGA

SEQ ID NO: 2648 - protein, 21 aa, Homo sapiens
MALTAHPSCLLALLVAGLAQG

SEQ ID NO: 2649 - protein, 26 aa, Homo sapiens
MFPFYSCWRTGLLLLLLAVAVRESWQ

SEQ ID NO: 2650 - protein, 40 aa, Homo sapiens
MGAAAGRSPHLGPAPARRPQRSLLLLQLLLLVAAPGSTQA

SEQ ID NO: 2651 - protein, 23 aa, Homo sapiens
MQIITTALVCLLLAGMWPEDVDS

SEQ ID NO: 2652 - protein, 16 aa, Homo sapiens
MKVSAVLLCLLLMTAA

SEQ ID NO: 2653 - protein, 19 aa, Homo sapiens
MKISVAAIPFFLLITIALG

SEQ ID NO: 2654 - protein, 21 aa, Homo sapiens
MKVSVAALSCLMLVAVLGSQA

SEQ ID NO: 2655 - protein, 23 aa, Homo sapiens
MKVSEAALSLLVLILIITSASRS

SEQ ID NO: 2656 - protein, 23 aa, Homo sapiens
MAPLKMLALVTLLLGASLQHIHA

SEQ ID NO: 2657 - protein, 20 aa, Homo sapiens
MKGLAAALLVLVCTMALCSC

SEQ ID NO: 2658 - protein, 21 aa, Homo sapiens
MALLLALSLLVLWTSPAPTLS

SEQ ID NO: 2659 - protein, 23 aa, Homo sapiens
MKVSAALLCLLLIAATFIPQGLA

SEQ ID NO: 2660 - protein, 26 aa, Homo sapiens
MCCTKSLLLAALMSVLLLHLCGESEA

SEQ ID NO: 2661 - protein, 23 aa, Homo sapiens
MAQSLALSLLILVLAFGIPRTQG

SEQ ID NO: 2662 - protein, 24 aa, Homo sapiens
MARLQTALLVVLVLLAVALQATEA

SEQ ID NO: 2663 - protein, 21 aa, Homo sapiens
MKVSVAALSCLMLVTALGSQA

SEQ ID NO: 2664 - protein, 26 aa, Homo sapiens
MAGLMTIVTSLLFLGVCAHHIIPTGS

SEQ ID NO: 2665 - protein, 23 aa, Homo sapiens
MMGLSLASAVLLASLLSLHLGTA

SEQ ID NO: 2666 - protein, 24 aa, Homo sapiens
MKGPPTFCSLLLLSLLLSPDPTAA

SEQ ID NO: 2667 - protein, 23 aa, Homo sapiens
MQVSTAALAVLLCTMALCNQFSA

SEQ ID NO: 2668 - protein, 23 aa, Homo sapiens
MQVSTAALAVLLCTMALCNQVLS

SEQ ID NO: 2669 - protein, 23 aa, Homo sapiens
MKLCVTVLSLLMLVAAFCSPALS

SEQ ID NO: 2670 - protein, 23 aa, Homo sapiens
MKVSAAALAVILIATALCAPASA

SEQ ID NO: 2671 - protein, 23 aa, Homo sapiens
MKASAALLCLLLTAAAFSPQGLA

SEQ ID NO: 2672 - protein, 21 aa, Homo sapiens
MQGPPLLTAAHLLCVCTAALA

SEQ ID NO: 2673 - protein, 21 aa, Homo sapiens
MSAVLLLALLGFILPLPGVQA

SEQ ID NO: 2674 - protein, 23 aa, Homo sapiens
MAFDVSCFFWVVLFSAGCKVITS

SEQ ID NO: 2675 - protein, 18 aa, Homo sapiens
MDYPTLLLALLHVYRALC

SEQ ID NO: 2676 - protein, 19 aa, Homo sapiens
MARPHPWWLCVLGTLVGLS

SEQ ID NO: 2677 - protein, 28 aa, Homo sapiens
MLRRRGSPGMGVHVGAALGALWFCLTGA

SEQ ID NO: 2678 - protein, 35 aa, Homo sapiens
MSGGWMAQVGAWRTGALGLALLLLLGLGLGLEAAA

SEQ ID NO: 2679 - protein, 19 aa, Homo sapiens
MALLFSLILAICTRPGFLA

SEQ ID NO: 2680 - protein, 25 aa, Homo sapiens
MGIQGGSVLFGLLLVLAVFCHSGHS

SEQ ID NO: 2681 - protein, 19 aa, Homo sapiens
MSRGLQLLLLSCAYSLAPA

SEQ ID NO: 2682 - protein, 21 aa, Homo sapiens
MALPVTALLLPLALLLHAARP

SEQ ID NO: 2683 - DNA, 63 bp, Homo sapiens
atggccttaccagtgaccgccttgctcctgccgctggccttgctgctccacgccgccaggccg

SEQ ID NO: 2684 - DNA, 63 bp, Homo sapiens
atggcactgcctgtgaccgccctgctgctgccactggccctgctgctgcacgcagccaggccc

SEQ ID NO: 2685 - DNA, 63 bp, Homo sapiens
atggcactgccagtgacagccctgctgctgcctctggccctgctgctgcacgcagccagacct

SEQ ID NO: 2686 - DNA, 63 bp, Homo sapiens
atggcactgcctgtgacagccctgctgctgccactggccctgctgctgcacgcagcccgccct

SEQ ID NO: 2687 - DNA, 63 bp, Homo sapiens
atggcactgcctgtgaccgccctgctgctgccactggccctgctgctgcacgcagcccgccct

SEQ ID NO: 2688 - DNA, 63 bp, Homo sapiens
atggcactgcctgtgaccgccctgctgctgccactggccctgctgctgcacgcagccaggcct

SEQ ID NO: 2689 - DNA, 63 bp, Homo sapiens
atggcactgccagtgaccgccctgctgctgcctctggccctgctgctgcacgcagccagacca

SEQ ID NO: 2690 - DNA, 63 bp, Homo sapiens
atggcactgcctgtgaccgccctgctgctgccactggccctgctgctgcacgcagccaggcca

SEQ ID NO: 2691 - DNA, 63 bp, Homo sapiens
atggcactgcctgtgaccgccctgctgctgccactggccctgctgctgcacgcagccagaccc

SEQ ID NO: 2692 - DNA, 63 bp, Homo sapiens
atggccctgcctgtgacagccctgctgctgcctctggctctgctgctgcatgccgctagaccc

SEQ ID NO: 2693 - DNA, 63 bp, Homo sapiens
atggccctccctgtcaccgccctgctgcttccgctggctcttctgctccacgccgctcggccc

SEQ ID NO: 2694 - protein, 22 aa, Homo sapiens
MARGAALALLLFGLLGVLVAAP

SEQ ID NO: 2695 - protein, 24 aa, Homo sapiens
MGAPAASLLLLLLLFACCWAPGGA

SEQ ID NO: 2696 - protein, 21 aa, Homo sapiens
MVGKMWPVLWTLCAVRVTVDA

SEQ ID NO: 2697 - protein, 23 aa, Homo sapiens
MGLPRLVCAFLLAACCCCPRVAG

SEQ ID NO: 2698 - protein, 28 aa, Homo sapiens
MLCPWRTANLGLLLILTIFLVAASSSLC

SEQ ID NO: 2699 - protein, 17 aa, Homo sapiens
MHLLLFQLLVLLPLGKT

SEQ ID NO: 2700 - protein, 32 aa, Homo sapiens
MLGAKPHWLPGPLHSPGLPLVLVLLALGAGWA

SEQ ID NO: 2701 - protein, 27 aa, Homo sapiens
MGSGRRALSAVPAVLLVLTLPGLPVWA

SEQ ID NO: 2702 - protein, 19 aa, Homo sapiens
MKILILGIFLFLCSTPAWA

SEQ ID NO: 2703 - protein, 21 aa, Homo sapiens
MGVKASQTGFVVLVLLQCCSA

SEQ ID NO: 2704 - protein, 26 aa, Homo sapiens
MGATTMDQKSLWAGVVVLLLLQGGSA

SEQ ID NO: 2705 - protein, 21 aa, Homo sapiens
MVRSVAWAGFMVLLMIPWGSA

SEQ ID NO: 2706 - protein, 20 aa, Homo sapiens
MNSGVCLCVLMAVLAAGALT

SEQ ID NO: 2707 - protein, 17 aa, Homo sapiens
MLAATVLTLALLGNAHA

SEQ ID NO: 2708 - protein, 28 aa, Homo sapiens
MHSKVTIICIRFLFWFLLLCMLIGKSHT

SEQ ID NO: 2709 - protein, 25 aa, Homo sapiens
MVPEVRVLSSLLGLALLWFPLDSHA

SEQ ID NO: 2710 - protein, 20 aa, Homo sapiens
MEMFQGLLLLLLLSMGGTWA

SEQ ID NO: 2711 - protein, 26 aa, Homo sapiens
MAPGSRTSLLLAFALLCLPWLQEAGA

SEQ ID NO: 2712 - protein, 18 aa, Homo sapiens
MRSAAVLALLLCAGQVTA

SEQ ID NO: 2713 - protein, 19 aa, Homo sapiens
MLLLPLPLLLFLLCSRAEA

SEQ ID NO: 2714 - protein, 18 aa, Homo sapiens
MAFLWLLSCWALLGTTFG

SEQ ID NO: 2715 - protein, 22 aa, Homo sapiens
MMKTLLLFVGLLLTWESGQVLG

SEQ ID NO: 2716 - protein, 19 aa, Homo sapiens
MPLLTLYLLLFWLSGYSIA

SEQ ID NO: 2717 - protein, 18 aa, Homo sapiens
MRLLVLLWGCLLLPGYEA

SEQ ID NO: 2718 - protein, 28 aa, Homo sapiens
MFPGCPRLWVLVVLGTSWVGWGSQGTEA

SEQ ID NO: 2719 - protein, 19 aa, Homo sapiens
MQIELSTCFFLCLLRFCFS

SEQ ID NO: 2720 - protein, 18 aa, Homo sapiens
MIFLYQVVHFILFTSVSG

SEQ ID NO: 2721 - protein, 19 aa, Homo sapiens
MRALLLLGFLLVSLESTLS

SEQ ID NO: 2722 - protein, 20 aa, Homo sapiens
MRLKNLTFIIILIISGELYA

SEQ ID NO: 2723 - protein, 27 aa, Homo sapiens
MESSRVRLLPLLGAALLLMLPLLGTRA

SEQ ID NO: 2724 - protein, 17 aa, Homo sapiens
MEKILILLLVALSVAYA

SEQ ID NO: 2725 - protein, 21 aa, Homo sapiens
MAAALALVAGVLSGAVLPLWS

SEQ ID NO: 2726 - protein, 22 aa, Homo sapiens
MFSFVDLRLLLLLAATALLTHG

SEQ ID NO: 2727 - protein, 23 aa, Homo sapiens
MMSFVQKGSWLLLALLHPTIILA

SEQ ID NO: 2728 - protein, 27 aa, Homo sapiens
MGPRLSVWLLLLPAALLLHEEHSRAAA

SEQ ID NO: 2729 - protein, 23 aa, Homo sapiens
MKTCWKIPVFFFVCSFLEPWASA

SEQ ID NO: 2730 - protein, 19 aa, Homo sapiens
MRAARALLPLLLQACWTAA

SEQ ID NO: 2731 - protein, 21 aa, Homo sapiens
MWVSWAPGLWLLGLWATFGHG

SEQ ID NO: 2732 - protein, 25 aa, Homo sapiens
MGRDQRAVAGPALRRWLLLGTVTVG

SEQ ID NO: 2733 - protein, 26 aa, Homo sapiens
MMANWAEARPLLILIVLLGQFVSIKA

SEQ ID NO: 2734 - protein, 30 aa, Homo sapiens
MRPQGPAASPQRLRGLLLLLLLQLPAPSSA

SEQ ID NO: 2735 - protein, 22 aa, Homo sapiens
MEGPRGWLVLCVLAISLASMVT

SEQ ID NO: 2736 - protein, 25 aa, Homo sapiens
MKIPWGSIPVLMLLLLLGLIDISQA

SEQ ID NO: 2737 - protein, 28 aa, Homo sapiens
MDVGPSSLPHLGLKLLLLLLLLPLRGQA

SEQ ID NO: 2738 - protein, 15 aa, Homo sapiens
MRPLLVLLLLGLAAG

SEQ ID NO: 2739 - protein, 27 aa, Homo sapiens
MVTAALGPVWAALLLFLLMCEIPMVEL

SEQ ID NO: 2740 - protein, 17 aa, Homo sapiens
MWLLYLLVPALFCRAGG

SEQ ID NO: 2741 - protein, 15 aa, Homo sapiens
MWCIVLFSLLAWVYA

SEQ ID NO: 2742 - protein, 20 aa, Homo sapiens
MGPLMVLFCLLFLYPGLADS

SEQ ID NO: 2743 - protein, 22 aa, Homo sapiens
MGPTSGPSLLLLLLTHLPLALG

SEQ ID NO: 2744 - protein, 19 aa, Homo sapiens
MRLLWGLIWASSFFTLSLQ

SEQ ID NO: 2745 - protein, 21 aa, Homo sapiens
MATSMGLLLLLLLLLTQPGAG

SEQ ID NO: 2746 - protein, 21 aa, Homo sapiens
MARRSVLYFILLNALINKGQA

SEQ ID NO: 2747 - protein, 22 aa, Homo sapiens
MKVISLFILVGFIGEFQSFSSA

SEQ ID NO: 2748 - protein, 20 aa, Homo sapiens
MLPPGTATLLTLLLAAGSLG

SEQ ID NO: 2749 - protein, 21 aa, Homo sapiens
MSACRSFAVAICILEISILTA

SEQ ID NO: 2750 - protein, 34 aa, Homo sapiens
MTVARPSVPAALPLLGELPRLLLLVLLCLPAVWG

SEQ ID NO: 2751 - protein, 25 aa, Homo sapiens
MGSNLSPQLCLMPFILGLLSGGVTT

SEQ ID NO: 2752 - protein, 17 aa, Artificial Sequence
  source: /note="Description of Artificial Sequence: Synthetic peptide"
RLLAKIICLMLWAICVA

SEQ ID NO: 2753 - protein, 18 aa, Homo sapiens
MWLLVSVILISRISSVGG

SEQ ID NO: 2754 - protein, 18 aa, Homo sapiens
MKLLHVFLLFLCFHLRFC

SEQ ID NO: 2755 - protein, 41 aa, Homo sapiens
MGASSPRSPEPVGPPAPGLPFCCGGSLLAVVVLLALPVAWG

SEQ ID NO: 2756 - protein, 20 aa, Homo sapiens
MGAAGLLGVFLALVAPGVLG

SEQ ID NO: 2757 - protein, 20 aa, Artificial Sequence
  source: /note="Description of Artificial Sequence: Synthetic Signal Sequence"
MKMWLLVSHLVIISITTCLA

SEQ ID NO: 2758 - protein, 30 aa, Homo sapiens
MGTATRRKPHLLLVAAVALVSSSAWSSALG

SEQ ID NO: 2759 - protein, 22 aa, Homo sapiens
MPLLLYTCLLWLPTSGLWTVQA

SEQ ID NO: 2760 - protein, 26 aa, Homo sapiens
MPRSCCSRSGALLLALLLQASMEVRG

SEQ ID NO: 2761 - protein, 23 aa, Homo sapiens
MGGHPQLRLVKALLLLGLNPVSA

SEQ ID NO: 2762 - protein, 24 aa, Homo sapiens
MSPNFKLQCHFILIFLTALRGESR

SEQ ID NO: 2763 - protein, 18 aa, Homo sapiens
MEKLLCFLVLTSLSHAFG

SEQ ID NO: 2764 - protein, 21 aa, Homo sapiens
MRLSVCLLLLTLALCCYRANA

SEQ ID NO: 2765 - protein, 20 aa, Homo sapiens
MKLAALLGLCVALSCSSAAA

SEQ ID NO: 2766 - protein, 21 aa, Homo sapiens
MQAAWLLGALVVPQLLGFGHG

SEQ ID NO: 2767 - protein, 21 aa, Homo sapiens
MRPAFALCLLWQALWPGPGGG

SEQ ID NO: 2768 - protein, 29 aa, Homo sapiens
MAGLNCGVSIALLGVLLLGAARLPRGAEA

SEQ ID NO: 2769 - protein, 21 aa, Homo sapiens
MNQTAILICCLIFLTLSGIQG

SEQ ID NO: 2770 - protein, 21 aa, Artificial Sequence
  source: /note="Description of Artificial Sequence: Synthetic Signal Sequence"
MSVKGMAIALAVILCATVVQG

SEQ ID NO: 2771 - protein, 34 aa, Homo sapiens
MARATLSAAPSNPRLLRVALLLLLLVAASRRAAG

SEQ ID NO: 2772 - protein, 34 aa, Homo sapiens
MAHATLSAAPSNPRLLRVALLLLLLVAASRRAAG

SEQ ID NO: 2773 - protein, 36 aa, Homo sapiens
MSLLSSRAARVPGPSSSLCALLVLLLLLTQPGPIAS

SEQ ID NO: 2774 - protein, 37 aa, Homo sapiens
MSLPSSRAARVPGPSGSLCALLALLLLLTPPGPLASA

SEQ ID NO: 2775 - protein, 22 aa, Homo sapiens
MKKSGVLFLLGIILLVLIGVQG

SEQ ID NO: 2776 - protein, 28 aa, Homo sapiens
MSSPQRRKAMPWALSLLLMGFQLLVTYA

SEQ ID NO: 2777 - protein, 28 aa, Homo sapiens
MLGLPWKGGLSWALLLLLLGSQILLIYA

SEQ ID NO: 2778 - protein, 26 aa, Homo sapiens
MAGPLRAPLLLLAILAVALAVSPAAG

SEQ ID NO: 2779 - protein, 20 aa, Homo sapiens
MMWPMHTPLLLLTALMVAVA

SEQ ID NO: 2780 - protein, 20 aa, Homo sapiens
MARPLCTLLLLMATLAGALA

SEQ ID NO: 2781 - protein, 20 aa, Homo sapiens
MAWPLCTLLLLLATQAVALA

SEQ ID NO: 2782 - protein, 20 aa, Homo sapiens
MAQHLSTLLLLLATLAVALA

SEQ ID NO: 2783 - protein, 34 aa, Homo sapiens
MYLVAGDRGLAGCGHLLVSLLGLLLLLARSGTRA

SEQ ID NO: 2784 - protein, 21 aa, Homo sapiens
MEIKHLLFLVAAACLLPMLSM

SEQ ID NO: 2785 - protein, 24 aa, Homo sapiens
MRLPRRAALGLLPLLLLLPPAPEA

SEQ ID NO: 2786 - protein, 22 aa, Homo sapiens
MLKPSLPFTSLLFLQLPLLGVG

SEQ ID NO: 2787 - protein, 37 aa, Homo sapiens
MPAGRRGPAAQSARRPPPLLPLLLLLCVLGAPRAGSG

SEQ ID NO: 2788 - protein, 21 aa, Homo sapiens
MRLLILALLGICSLTAYIVEG

SEQ ID NO: 2789 - protein, 22 aa, Homo sapiens
MRTPGPLPVLLLLLAGAPAARP

SEQ ID NO: 2790 - protein, 23 aa, Homo sapiens
MTATEALLRVLLLLLAFGHSTYG

SEQ ID NO: 2791 - protein, 26 aa, Homo sapiens
MAAASRSASGWALLLLVALWQQRAAG

SEQ ID NO: 2792 - protein, 22 aa, Homo sapiens
MRGMKLLGALLALAALLQGAVS

SEQ ID NO: 2793 - protein, 19 aa, Homo sapiens
MRFMTLLFLTALAGALVCA

SEQ ID NO: 2794 - protein, 21 aa, Homo sapiens
MKFQGPLACLLLALCLGSGEA

SEQ ID NO: 2795 - protein, 31 aa, Homo sapiens
MMALGAAGATRVFVAMVAAALGGHPLLGVSA

SEQ ID NO: 2796 - protein, 21 aa, Homo sapiens
MQRLGATLLCLLLAAAVPTAP

SEQ ID NO: 2797 - protein, 18 aa, Homo sapiens
MVAAVLLGLSWLCSPLGA

SEQ ID NO: 2798 - protein, 16 aa, Homo sapiens
MWSGWWLWPLVAVCTA

SEQ ID NO: 2799 - protein, 24 aa, Homo sapiens
MGAGPSLLLAALLLLLSGDGAVRC

SEQ ID NO: 2800 - protein, 22 aa, Homo sapiens
MAPPGSSTVFLLALTIIASTWA

SEQ ID NO: 2801 - protein, 23 aa, Homo sapiens
MEAPAAGLFLLLLLGTWAPAPGS

SEQ ID NO: 2802 - protein, 25 aa, Homo sapiens
MASLFRSYLPAIWLLLSQLLRESLA

SEQ ID NO: 2803 - protein, 21 aa, Homo sapiens
MRGLAVLLTVALATLLAPGAG

SEQ ID NO: 2804 - protein, 25 aa, Homo sapiens
MGSRAELCTLLGGFSFLLLLIPGEG

SEQ ID NO: 2805 - protein, 22 aa, Homo sapiens
MRASSFLIVVVFLIAGTLVLEA

SEQ ID NO: 2806 - protein, 16 aa, Homo sapiens
MIRTLLLSTLVAGALS

SEQ ID NO: 2807 - protein, 25 aa, Homo sapiens
MDRGTLPLAVALLLASCSLSPTSLA

SEQ ID NO: 2808 - protein, 32 aa, Homo sapiens
MAAAVPRAAFLSPLLPLLLGFLLLSAPHGGSG

SEQ ID NO: 2809 - protein, 21 aa, Homo sapiens
MRALWVLGLCCVLLTFGSVRA

SEQ ID NO: 2810 - protein, 29 aa, Homo sapiens
MISLPGPLVTNLLRFLFLGLSALAPPSRA

SEQ ID NO: 2811 - protein, 17 aa, Homo sapiens
MDYLLMIFSLLFVACQG

SEQ ID NO: 2812 - protein, 27 aa, Homo sapiens
MVPKLFTSQICLLLLLGLMGVEGSLHA

SEQ ID NO: 2813 - protein, 23 aa, Homo sapiens
MKVSAALLWLLLIAAAFSPQGLA

SEQ ID NO: 2814 - protein, 20 aa, Homo sapiens
MDCQLSILLLLSCSVLDSFG

SEQ ID NO: 2815 - protein, 17 aa, Homo sapiens
MALDYLLLLLLASAVAA

SEQ ID NO: 2816 - protein, 16 aa, Homo sapiens
MVCSLWVLLLVSSVLA

SEQ ID NO: 2817 - protein, 18 aa, Homo sapiens
MEFLWAPLLGLCCSLAAA

SEQ ID NO: 2818 - protein, 25 aa, Homo sapiens
MRLLPLLRTVLWAAFLGSPLRGGSS

SEQ ID NO: 2819 - protein, 27 aa, Homo sapiens
MARPGQRWLGKWLVAMVVWALCRLATP

SEQ ID NO: 2820 - protein, 27 aa, Homo sapiens
MGPPHSGPGGVRVGALLLLGVLGLVSG

SEQ ID NO: 2821 - protein, 24 aa, Homo sapiens
MRPSGTAGAALLALLAALCPASRA

SEQ ID NO: 2822 - protein, 22 aa, Homo sapiens
MALGVPISVYLLFNAMTALTEE

SEQ ID NO: 2823 - protein, 23 aa, Homo sapiens
MGRGWGFLFGLLGAVWLLSSGHG

SEQ ID NO: 2824 - protein, 27 aa, Homo sapiens
MGVHECPAWLWLLLSLLSLPLGLPVLG

SEQ ID NO: 2825 - protein, 24 aa, Homo sapiens
MDHLGASLWPQVGSLCLLLAGAAW

SEQ ID NO: 2826 - protein, 21 aa, Homo sapiens
MIASQFLSALTLVLLIKESGA

SEQ ID NO: 2827 - protein, 18 aa, Homo sapiens
MLALLCSCLLLAAGASDA

SEQ ID NO: 2828 - protein, 27 aa, Homo sapiens
MKLGCVLMAWALYLSLGVLWVAQMLLA

SEQ ID NO: 2829 - protein, 16 aa, Homo sapiens
MLPRLLLLICAPLCEP

SEQ ID NO: 2830 - protein, 19 aa, Homo sapiens
MLLWSLLVIFDAVTEQADS

SEQ ID NO: 2831 - protein, 19 aa, Homo sapiens
MFSMRIVCLVLSVVGTAWT

SEQ ID NO: 2832 - protein, 30 aa, Homo sapiens
MKRMVSWSFHKLKTMKHLLLLLLCVFLVKS

SEQ ID NO: 2833 - protein, 26 aa, Artificial Sequence
  source: /note="Description of Artificial Sequence: Synthetic Signal Sequence"
MSWSLHPRNLILYFYALLFLSSTCVA

SEQ ID NO: 2834 - protein, 24 aa, Homo sapiens
MRSGCVVVHVWILAGLWLAVAGRP

SEQ ID NO: 2835 - protein, 28 aa, Homo sapiens
MDSDETGFEHSGLWVSVLAGLLLGACQA

SEQ ID NO: 2836 - protein, 24 aa, Homo sapiens
MLGARLRLWVCALCSVCSMSVLRA

SEQ ID NO: 2837 - protein, 22 aa, Homo sapiens
MGAPACALALCVAVAIVAGASS

SEQ ID NO: 2838 - protein, 21 aa, Homo sapiens
MRLLLALLGVLLSVPGPPVLS

SEQ ID NO: 2839 - protein, 24 aa, Homo sapiens
MTPSPLLLLLLPPLLLGAFPPAAA

SEQ ID NO: 2840 - protein, 31 aa, Homo sapiens
MLRGPGPGLLLLAVQCLGTAVPSTGASKSKR

SEQ ID NO: 2841 - protein, 29 aa, Homo sapiens
MERAAPSRRVPLPLLLLGGLALLAAGVDA

SEQ ID NO: 2842 - protein, 29 aa, Homo sapiens
MELSGATMARGLAVLLVLFLHIKNLPAQA

SEQ ID NO: 2843 - protein, 23 aa, Homo sapiens
MDLLWILPSLWLLLLGGPACLKT

SEQ ID NO: 2844 - protein, 19 aa, Homo sapiens
MRLFLWNAVLTLFVTSLIG

SEQ ID NO: 2845 - protein, 21 aa, Homo sapiens
MRLSWFRVLTVLSICLSAVAT

SEQ ID NO: 2846 - protein, 16 aa, Homo sapiens
MVWKWMPLLLLLVCVA

SEQ ID NO: 2847 - protein, 29 aa, Homo sapiens
MVRARHQPGGLCLLLLLLCQFMEDRSAQA

SEQ ID NO: 2848 - protein, 20 aa, Homo sapiens
MWKRWLALALALVAVAWVRA

SEQ ID NO: 2849 - protein, 26 aa, Homo sapiens
MRPGAPGPLWPLPWGALAWAVGFVSS

SEQ ID NO: 2850 - protein, 18 aa, Homo sapiens
MKTLQFFFLFCCWKAICC

SEQ ID NO: 2851 - protein, 24 aa, Homo sapiens
MAPISLSWLLRLATFCHLTVLLAG

SEQ ID NO: 2852 - protein, 22 aa, Homo sapiens
MAMTWIVFSLWPLTVFMGHIGG

SEQ ID NO: 2853 - protein, 26 aa, Artificial Sequence
  source: /note="Description of Artificial Sequence: Synthetic Signal Sequence"
MTAAAGSAGRAAVPLLLCALLAPGGA

SEQ ID NO: 2854 - protein, 18 aa, Homo sapiens
MTPPRLFWVWLLVAGTQG

SEQ ID NO: 2855 - protein, 19 aa, Homo sapiens
MWLLLTMASLISVLGTTHG

SEQ ID NO: 2856 - protein, 16 aa, Homo sapiens
MKWMVVVLVCLQLLEA

SEQ ID NO: 2857 - protein, 21 aa, Homo sapiens
MQRLCVYVLIFALALAAFSEA

SEQ ID NO: 2858 - protein, 23 aa, Homo sapiens
MRGSELPLVLLALVLCLAPRGRA

SEQ ID NO: 2859 - protein, 31 aa, Homo sapiens
MVRPLNPRPLPPVVLMLLLLLPPSPLPLAAG

SEQ ID NO: 2860 - protein, 27 aa, Homo sapiens
MAPHRPAPALLCALSLALCALSLPVRA

SEQ ID NO: 2861 - protein, 19 aa, Homo sapiens
MNWHLPLFLLASVTLPSIC

SEQ ID NO: 2862 - protein, 22 aa, Homo sapiens
MALKNKFSCLWILGLCLVATTS

SEQ ID NO: 2863 - protein, 20 aa, Homo sapiens
MKSIYFVAGLFVMLVQGSWQ

SEQ ID NO: 2864 - protein, 14 aa, Homo sapiens
MLLPLLLLLPMCWA

SEQ ID NO: 2865 - protein, 39 aa, Homo sapiens
MEFSSPSREECPKPLSRVSIMAGSLTGLLLLQAVSWASG

SEQ ID NO: 2866 - protein, 18 aa, Homo sapiens
MLCLLLTLGVALVCGVPA

SEQ ID NO: 2867 - protein, 19 aa, Homo sapiens
MYGKIIFVLLLSAIVSISA

SEQ ID NO: 2868 - protein, 19 aa, Homo sapiens
MYGKIIFVLLLSEIVSISA

SEQ ID NO: 2869 - protein, 19 aa, Homo sapiens
MYGKIIFVLLLSGIVSISA

SEQ ID NO: 2870 - protein, 24 aa, Homo sapiens
MDYYRKYAAIFLVTLSVFLHVLHS

SEQ ID NO: 2871 - protein, 23 aa, Homo sapiens
MELRARGWWLLCAAAALVACARG

SEQ ID NO: 2872 - protein, 21 aa, Homo sapiens
MAAAMPLALLVLLLLGPGGWC

SEQ ID NO: 2873 - protein, 27 aa, Homo sapiens
MAVTDSLSRAATVLATVLLLSFGSVAA

SEQ ID NO: 2874 - protein, 25 aa, Homo sapiens
MTPQSLLQTTLFLLSLLFLVQGAHG

SEQ ID NO: 2875 - protein, 24 aa, Homo sapiens
MARLGNCSLTWAALIILLLPGSLE

SEQ ID NO: 2876 - protein, 17 aa, Homo sapiens
MWLQSLLLLGTVACSIS

SEQ ID NO: 2877 - protein, 22 aa, Homo sapiens
MLLLVTSLLLCELPHPAFLLIP

SEQ ID NO: 2878 - DNA, 66 bp, Homo sapiens
atgcttctcctggtgacaagccttctgctctgtgagttaccacacccagcattcctcctgatccca

SEQ ID NO: 2879 - DNA, 66 bp, Homo sapiens
atgctgctgctcgtgacatctctgctgctgtgcgagctgccccaccccgcctttctgctgatcccc

SEQ ID NO: 2880 - protein, 26 aa, Homo sapiens
MRNSYRFLASSLSVVVSLLLIPEDVC

SEQ ID NO: 2881 - protein, 18 aa, Homo sapiens
MQPILLLLAFLLLPRADA

SEQ ID NO: 2882 - protein, 18 aa, Homo sapiens
MQPFLLLLAFLLTPGAGT

SEQ ID NO: 2883 - protein, 24 aa, Homo sapiens
MSRTAYTVGALLLLLGTLLPAAEG

SEQ ID NO: 2884 - protein, 19 aa, Homo sapiens
MKLASGFLVLWLSLGGGLA

SEQ ID NO: 2885 - protein, 26 aa, Homo sapiens
MAAGSRTSLLLAFGLLCLSWLQEGSA

SEQ ID NO: 2886 - protein, 34 aa, Homo sapiens
MARAALSAAPSNPRLLRVALLLLLLVAAGRRAAG

SEQ ID NO: 2887 - protein, 21 aa, Homo sapiens
MNAFLLFALCLLGAWAALAGG

SEQ ID NO: 2888 - protein, 18 aa, Homo sapiens
MSALGAVIALLLWGQLFA

SEQ ID NO: 2889 - protein, 31 aa, Homo sapiens
MLVRRGARAGPRMPRGWTALCLLSLLPSGFM

SEQ ID NO: 2890 - protein, 23 aa, Homo sapiens
MARVLGAPVALGLWSLCWSLAIA

SEQ ID NO: 2891 - protein, 35 aa, Homo sapiens
MLLRSKPALPPPLMLLLLGPLGPLSPGALPRPAQA

SEQ ID NO: 2892 - protein, 19 aa, Homo sapiens
MKHSLNALLIFLIITSAWG

SEQ ID NO: 2893 - protein, 22 aa, Homo sapiens
MDTSPLCFSILLVLCIFIQSSA

SEQ ID NO: 2894 - protein, 31 aa, Homo sapiens
MWVTKLLPALLLQHVLLHLLLLPIAIPYAEG

SEQ ID NO: 2895 - protein, 35 aa, Homo sapiens
MGRWAWVPSPWPPPGLGPFLLLLLLLLLLPRGFQP

SEQ ID NO: 2896 - protein, 22 aa, Homo sapiens
MGPRARPALLLLMLLQTAVLQG

SEQ ID NO: 2897 - protein, 15 aa, Homo sapiens
MWFLTTLLLWVPVDG

SEQ ID NO: 2898 - protein, 19 aa, Homo sapiens
MKFFVFALVLALMISMISA

SEQ ID NO: 2899 - protein, 19 aa, Homo sapiens
MKFFVFALILALMLSMTGA

SEQ ID NO: 2900 - protein, 18 aa, Homo sapiens
MKALIAALLLITLQYSCA

SEQ ID NO: 2901 - protein, 24 aa, Homo sapiens
MAVMAPRTLLLLLSGALALTQTWA

SEQ ID NO: 2902 - protein, 24 aa, Homo sapiens
MAVMAPRTLLLLLSGALALTHTWA

SEQ ID NO: 2903 - protein, 24 aa, Homo sapiens
MAVMAPRTLLLLLLGALALTQTWA

SEQ ID NO: 2904 - protein, 24 aa, Homo sapiens
MAIMAPRTLVLLLSGALALTQTWA

SEQ ID NO: 2905 - protein, 24 aa, Homo sapiens
MAVMPPRTLLLLLSGALALTQTWA

SEQ ID NO: 2906 - protein, 21 aa, Homo sapiens
MVDGTLLLLLSEALALTQTWA

SEQ ID NO: 2907 - protein, 21 aa, Homo sapiens
MAPRSLLLLLSGALALTDTWA

SEQ ID NO: 2908 - protein, 24 aa, Homo sapiens
MRVTAPRTVLLLLSGALALTETWA

SEQ ID NO: 2909 - protein, 24 aa, Homo sapiens
MRVTAPRTLLLLLWGAVALTETWA

SEQ ID NO: 2910 - protein, 24 aa, Homo sapiens
MRVTAPRTVLLLLSAALALTETWA

SEQ ID NO: 2911 - protein, 24 aa, Homo sapiens
MLVMAPRTVLLLLSAALALTETWA

SEQ ID NO: 2912 - protein, 24 aa, Homo sapiens
MRVTAPRTVLLLLWGAVALTETWA

SEQ ID NO: 2913 - protein, 24 aa, Homo sapiens
MRVTAPRTLLLLLWGALALTETWA

SEQ ID NO: 2914 - protein, 23 aa, Artificial Sequence
  source: /note="Description of Artificial Sequence: Synthetic peptide"
RVTAPRTLLLLLWGALALTETWA

SEQ ID NO: 2915 - protein, 24 aa, Homo sapiens
MRVMEPRTLILLLSGALALTETWA

SEQ ID NO: 2916 - protein, 24 aa, Homo sapiens
MRVMAPRTLILLLSGALALTETWA

SEQ ID NO: 2917 - protein, 24 aa, Homo sapiens
MRVMAPRTLLLLLSGALALTETWA

SEQ ID NO: 2918 - protein, 24 aa, Homo sapiens
MRVMAPQALLLLLSGALALIETWA

SEQ ID NO: 2919 - protein, 24 aa, Homo sapiens
MRVMAPRALLLLLSGGLALTETWA

SEQ ID NO: 2920 - protein, 25 aa, Homo sapiens
GSGWVPWVVALLVNLTRLDSSMTQG

SEQ ID NO: 2921 - protein, 28 aa, Homo sapiens
MRPEDRMFHIRAVILRALSLAFLLSLRG

SEQ ID NO: 2922 - protein, 29 aa, Homo sapiens
MMVLQVSAAPRTVALTALLMVLLTSVVQG

SEQ ID NO: 2923 - protein, 23 aa, Homo sapiens
MILNKALMLGALALTTVMSPCGG

SEQ ID NO: 2924 - protein, 32 aa, Artificial Sequence
  source: /note="Description of Artificial Sequence: Synthetic Signal Sequence"
MSWKKALRIPGGLRAATVTLMLSMLSTPVAEG

SEQ ID NO: 2925 - protein, 32 aa, Artificial Sequence
  source: /note="Description of Artificial Sequence: Synthetic Signal Sequence"
MSWKKALRIPGGLRVATVTLMLAMLSTPVAEG

SEQ ID NO: 2926 - protein, 23 aa, Homo sapiens
MILNKALLLGALALTTVMSPCGG

SEQ ID NO: 2927 - protein, 23 aa, Homo sapiens
MILNKALLLGALALTAVMSPCGG

SEQ ID NO: 2928 - protein, 32 aa, Artificial Sequence
  source: /note="Description of Artificial Sequence: Synthetic Signal Sequence"
MSWKKSLRIPGDLRVATVTLMLAILSSSLAEG

SEQ ID NO: 2929 - protein, 23 aa, Homo sapiens
MILNKALMLGSLALTTVMSPCGG

SEQ ID NO: 2930 - protein, 32 aa, Artificial Sequence
  source: /note="Description of Artificial Sequence: Synthetic Signal Sequence"
MSWKKALRIPGGLRVATVTLMLAMLSTSVAEG

SEQ ID NO: 2931 - protein, 32 aa, Artificial Sequence
  source: /note="Description of Artificial Sequence: Synthetic Signal Sequence"
MSWKKALRIPGDLRVATVTLMLAMLSSLLAEG

SEQ ID NO: 2932 - protein, 25 aa, Homo sapiens
MAISGVPVLGFFIIAVLMSAQESWA

SEQ ID NO: 2933 - protein, 29 aa, Homo sapiens
MVCLRLPGGSCMAVLTVTLMVLSSPLALA

SEQ ID NO: 2934 - protein, 29 aa, Homo sapiens
MVCLKLPGGSCMTALTVTLMVLSSPLALA

SEQ ID NO: 2935 - protein, 29 aa, Homo sapiens
MVCLKFPGGSCMAALTVTLMVLSSPLALA

SEQ ID NO: 2936 - protein, 29 aa, Homo sapiens
MVCLKLPGGSCMAALTVTLMVLSSPLALA

SEQ ID NO: 2937 - protein, 29 aa, Homo sapiens
MVCLKLPGGSSLAALTVTLMVLSSRLAFA

SEQ ID NO: 2938 - protein, 29 aa, Homo sapiens
MVCLKLPGGSCMAALTVTLTVLSSPLALA

SEQ ID NO: 2939 - protein, 32 aa, Artificial Sequence
  source: /note="Description of Artificial Sequence: Synthetic Signal Sequence"
MSWKMALQIPGGFWAAAVTVMLVMLSTPVAEA

SEQ ID NO: 2940 - protein, 23 aa, Homo sapiens
MFARMSDLHVLLLMALVGKTACG

SEQ ID NO: 2941 - protein, 19 aa, Homo sapiens
MDWTWRVFCLLAVAPGAHS

SEQ ID NO: 2942 - protein, 19 aa, Homo sapiens
  MOD_RES (5)..(8): Any amino acid
MDWTXXXXFLVAAATRVHS

SEQ ID NO: 2943 - protein, 19 aa, Homo sapiens
MDWTWRILFLVAAATGAHS

SEQ ID NO: 2944 - protein, 19 aa, Homo sapiens
MKHLWFLLLWCQLPDVGVL

SEQ ID NO: 2945 - protein, 19 aa, Homo sapiens
MDILCSTLLLLTVPSGVLS

SEQ ID NO: 2946 - protein, 19 aa, Homo sapiens
MEFGLSWLFLVAILKGVQC

SEQ ID NO: 2947 - protein, 20 aa, Homo sapiens
MGSQVHLLSFLLLWISDTRA

SEQ ID NO: 2948 - protein, 22 aa, Homo sapiens
MDMRVPAQLLGLLLLWLRRVRC

SEQ ID NO: 2949 - protein, 22 aa, Homo sapiens
MDMRVPAQLLGLLLLWLPGAKC

SEQ ID NO: 2950 - protein, 22 aa, Homo sapiens
MDMRVPAQLLGLLLLWLRGARC

SEQ ID NO: 2951 - protein, 4 aa, Homo sapiens
GSSG

SEQ ID NO: 2952 - protein, 20 aa, Homo sapiens
MRLPAQLLGLLMLWVPGSSG

SEQ ID NO: 2953 - protein, 20 aa, Homo sapiens
MEAPAQLLFLLLLWLPDTTG

SEQ ID NO: 2954 - protein, 20 aa, Homo sapiens
METPAQLLFLLLLWLPDTTG

SEQ ID NO: 2955 - protein, 4 aa, Artificial Sequence
  source: /note="Description of Artificial Sequence: Synthetic peptide"
VPSG

SEQ ID NO: 2956 - protein, 20 aa, Homo sapiens
MEAPAQLLFLLLLWLPDTTR

SEQ ID NO: 2957 - protein, 20 aa, Homo sapiens
MVLQTQVFISLLLWISGAYG

SEQ ID NO: 2958 - protein, 20 aa, Homo sapiens
MAWTPLFLFLLTCCPGGSNS

SEQ ID NO: 2959 - protein, 19 aa, Homo sapiens
MTCSPLLLTLLIHCTGSWA

SEQ ID NO: 2960 - protein, 19 aa, Homo sapiens
MAWAPLLLTLLAHCTDCWA

SEQ ID NO: 2961 - protein, 18 aa, Homo sapiens
MDWTWILFLVAAATRVHS

SEQ ID NO: 2962 - DNA, 54 bp, Homo sapiens
atggactggacatggatactcttcctggtagcagccgccacacgagtgcacagc

SEQ ID NO: 2963 - DNA, 54 bp, Homo sapiens
atggactggacctggattctgtttctggtggccgctgccacaagagtgcacagc

SEQ ID NO: 2964 - DNA, 54 bp, Homo sapiens
atggattggacctggattctgtttctggtggccgctgccacaagagtgcacagc

SEQ ID NO: 2965 - protein, 23 aa, Homo sapiens
MGVPRPQPWALGLLLFLLPGSLG

SEQ ID NO: 2966 - protein, 18 aa, Homo sapiens
MVLHLLLFLLLTPQGGHS

SEQ ID NO: 2967 - protein, 24 aa, Homo sapiens
MALWMRLLPLLALLALWGPDPAAA

SEQ ID NO: 2968 - protein, 24 aa, Homo sapiens
MAPRGCIVAVFAIFCISRLLCSHG

SEQ ID NO: 2969 - protein, 24 aa, Homo sapiens
MRPRCCILALVCWITVFLLQCSKG

SEQ ID NO: 2970 - protein, 27 aa, Homo sapiens
MGTGGRRGAAAAPLLVAVAALLLGAAG

SEQ ID NO: 2971 - protein, 20 aa, Homo sapiens
MDPRLPAWALVLLGPALVFA

SEQ ID NO: 2972 - protein, 30 aa, Homo sapiens
MKSGSGGGSPTSLWGLLFLSAALSLWPTSG

SEQ ID NO: 2973 - protein, 24 aa, Homo sapiens
MGIPMGKSMLVLLTFLAFASCCIA

SEQ ID NO: 2974 - protein, 25 aa, Homo sapiens
MSEVPVARVWLVLLLLTVQVGVTAG

SEQ ID NO: 2975 - protein, 39 aa, Homo sapiens
MLPRVGCPALPLPPPPLLPLLPLLLLLLGASGGGGGARA

SEQ ID NO: 2976 - protein, 27 aa, Homo sapiens
MQRARPTLWAAALTLLVLLRGPPVARA

SEQ ID NO: 2977 - protein, 21 aa, Homo sapiens
MLPLCLVAALLLAAGPGPSLG

SEQ ID NO: 2978 - protein, 26 aa, Homo sapiens
MERPSLRALLLGAAGLLLLLLPLSSS

SEQ ID NO: 2979 - protein, 27 aa, Homo sapiens
MALRKGGLALALLLLSWVALGPRSLEG

SEQ ID NO: 2980 - protein, 22 aa, Homo sapiens
MKGSIFTLFLFSVLFAISEVRS

SEQ ID NO: 2981 - protein, 29 aa, Homo sapiens
MGPERTGAAPLPLLLVLALSQGILNCCLA

SEQ ID NO: 2982 - protein, 32 aa, Homo sapiens
MGPGPSRAPRAPRLMLCALALMVAAGGCVVSA

SEQ ID NO: 2983 - protein, 39 aa, Homo sapiens
MFPTESAWLGKRGANPGPEAAVRETVMLLLCLGVPTGRP

SEQ ID NO: 2984 - protein, 41 aa, Homo sapiens
MGSRTPESPLHAVQLRWGPRRRPPLLPLLLLLLPPPPRVGG

SEQ ID NO: 2985 - protein, 23 aa, Homo sapiens
MAAAGQLCLLYLSAGLLSRLGAA

SEQ ID NO: 2986 - protein, 33 aa, Homo sapiens
MAGARSRDPWGASGICYLFGSLLVELLFSRAVA

SEQ ID NO: 2987 - protein, 18 aa, Homo sapiens
MWLFHTLLCIASLALLAA

SEQ ID NO: 2988 - protein, 31 aa, Homo sapiens
MARALCPLQALWLLEWVLLLLGPCAAPPAWA

SEQ ID NO: 2989 - protein, 25 aa, Homo sapiens
MKDSCITVMAMALLSGFFFFAPASS

SEQ ID NO: 2990 - protein, 16 aa, Homo sapiens
MALRVLLLTALTLCHG

SEQ ID NO: 2991 - protein, 30 aa, Homo sapiens
MAFPPRRRLRLGPRGLPLLLSGLLLPLCRA

SEQ ID NO: 2992 - protein, 19 aa, Homo sapiens
MTRTRAALLLFTALATSLG

SEQ ID NO: 2993 - protein, 20 aa, Homo sapiens
MNLQPIFWIGLISSVCCVFA

SEQ ID NO: 2994 - protein, 22 aa, Homo sapiens
MLGLRPPLLALVGLLSLGCVLS

SEQ ID NO: 2995 - protein, 27 aa, Homo sapiens
MAGPRPSPWARLLLAALISVSLSGTLA

SEQ ID NO: 2996 - protein, 19 aa, Homo sapiens
MVALPMVLVLLLVLSRGES

SEQ ID NO: 2997 - protein, 18 aa, Homo sapiens
MNQLSFLLFLIATTRGWS

SEQ ID NO: 2998 - protein, 28 aa, Artificial Sequence
  source: /note="Description of Artificial Sequence: Synthetic Signal Sequence"
MKPPRPVRTCSKVLVLLSLLAIHQTTTA

SEQ ID NO: 2999 - protein, 27 aa, Homo sapiens
MAPSSPRPALPALLVLLGALFPGPGNA

SEQ ID NO: 3000 - protein, 23 aa, Homo sapiens
MASPFALLMVLVVLSCKSSCSLG

SEQ ID NO: 3001 - protein, 23 aa, Homo sapiens
MALSFSLLMAVLVLSYKSICSLG

SEQ ID NO: 3002 - protein, 23 aa, Homo sapiens
MALPFALMMALVVLSCKSSCSLG

SEQ ID NO: 3003 - protein, 23 aa, Homo sapiens
MALTFALLVALLVLSCKSSCSVG

SEQ ID NO: 3004 - protein, 21 aa, Homo sapiens
MALPFVLLMALVVLNCKSICS

SEQ ID NO: 3005 - protein, 20 aa, Homo sapiens
MALPFALLMALVVLSCKSSC

SEQ ID NO: 3006 - protein, 23 aa, Homo sapiens
MARSFSLLMVVLVLSYKSICSLG

SEQ ID NO: 3007 - protein, 23 aa, Homo sapiens
MALTFYLLVALVVLSYKSFSSLG

SEQ ID NO: 3008 - protein, 21 aa, Homo sapiens
MTNKCLLQIALLLCFSTTALS

SEQ ID NO: 3009 - protein, 27 aa, Artificial Sequence
  source: /note="Description of Artificial Sequence: Synthetic Signal Sequence"
MSTKPDMIQKCLWLEILMGIFIAGTLS

SEQ ID NO: 3010 - protein, 21 aa, Homo sapiens
MALLFPLLAALVMTSYSPVGS

SEQ ID NO: 3011 - protein, 26 aa, Homo sapiens
MLLSQNAFIFRSLNLVLMVYISLVFG

SEQ ID NO: 3012 - protein, 17 aa, Homo sapiens
MALLFLLPLVMQGVSRA

SEQ ID NO: 3013 - protein, 30 aa, Homo sapiens
MAPRRARGCRTLGLPALLLLLLLRPPATRG

SEQ ID NO: 3014 - DNA, 90 bp, Homo sapiens
atggccccgcggcgggcgcgcggctgccggaccctcggtctcccggcgctgctactgctgctgctgctccggccgccggcgacgcggggc

SEQ ID NO: 3015 - protein, 24 aa, Homo sapiens
MKASSLAFSLLSAAFYLLWTPSTG

SEQ ID NO: 3016 - protein, 25 aa, Homo sapiens
MEICRGLRSHLITLLLFLFHSETIC

SEQ ID NO: 3017 - protein, 17 aa, Homo sapiens
MKVLLRLICFIALLISS

SEQ ID NO: 3018 - protein, 18 aa, Homo sapiens
MGFWILAILTILMYSTAA

SEQ ID NO: 3019 - protein, 19 aa, Homo sapiens
MWSLLLCGLSIALPLSVTA

SEQ ID NO: 3020 - protein, 18 aa, Homo sapiens
MHSSALLCCLVLLTGVRA

SEQ ID NO: 3021 - protein, 21 aa, Homo sapiens
MLPCLVVLLAALLSLRLGSDA

SEQ ID NO: 3022 - protein, 19 aa, Homo sapiens
MAWSLGSWLGGCLLVSALG

SEQ ID NO: 3023 - protein, 22 aa, Homo sapiens
MCPARSLLLVATLVLLDHLSLA

SEQ ID NO: 3024 - protein, 22 aa, Homo sapiens
MCHQQLVISWFSLVFLASPLVA

SEQ ID NO: 3025 - DNA, 66 bp, Homo sapiens
atgtgtcaccagcagttggtcatctcttggttttccctggtttttctggcatctcccctcgtggcc

SEQ ID NO: 3026 - DNA, 66 bp, Homo sapiens
atgtgccaccagcagctggtcatcagctggttctccctggtgtttctggcatcccctctggtggca

SEQ ID NO: 3027 - DNA, 66 bp, Homo sapiens
atgtgccaccagcagctggtcatcagctggttctccctggtgtttctggccagccctctggtggcc

SEQ ID NO: 3028 - DNA, 66 bp, Homo sapiens
atgtgccaccagcagctggtcatcagctggttctccctggtgtttctggcaagccctctggtggca

SEQ ID NO: 3029 - DNA, 66 bp, Homo sapiens
atgtgccaccagcagctggtcatcagctggttctccctggtgtttctggcatccccactggtggca

SEQ ID NO: 3030 - DNA, 66 bp, Homo sapiens
atgtgccaccaacagctcgtgatcagctggttctccctggtgttcctggctagccccctggtggcc

SEQ ID NO: 3031 - DNA, 66 bp, Homo sapiens
atgtgccaccagcagctggtcatctcttggttcagcctggtgtttctggcctcccccctggtggcc

SEQ ID NO: 3032 - DNA, 66 bp, Homo sapiens
atgtgccaccagcagctggtcatctcctggttctctctggtgtttctggcatctcctctggtggca

SEQ ID NO: 3033 - DNA, 66 bp, Homo sapiens
atgtgccaccagcagctggtcatctcttggttcagcctggtgtttctggcatccccactggtggca

SEQ ID NO: 3034 - protein, 32 aa, Homo sapiens
MGAARSPPSAVPGPLLGLLLLLLGVLAPGGAS

SEQ ID NO: 3035 - protein, 17 aa, Homo sapiens
MSLVLLSLAALCRSAVP

SEQ ID NO: 3036 - protein, 20 aa, Homo sapiens
MPVPWFLLSLALGRSPVVLS

SEQ ID NO: 3037 - protein, 23 aa, Homo sapiens
MTPGKTSLVSLLLLLSLEAIVKA

SEQ ID NO: 3038 - protein, 20 aa, Homo sapiens
MVKYLLLSILGLAFLSEAAA

SEQ ID NO: 3039 - protein, 18 aa, Homo sapiens
MNCRELPLTLWVLISVST

SEQ ID NO: 3040 - protein, 28 aa, Homo sapiens
MRHNWTPDLSPLWVLLLCAHVVTLLVRA

SEQ ID NO: 3041 - protein, 24 aa, Homo sapiens
MKLQCVSLWLLGTILILCSVDNHG

SEQ ID NO: 3042 - protein, 20 aa, Homo sapiens
MYRMQLLSCIALSLALVTNS

SEQ ID NO: 3043 - DNA, 60 bp, Homo sapiens
atgtaccgaatgcaactgctgagctgcatcgccctgagcctggcactcgtgaccaacagc

SEQ ID NO: 3044 - DNA, 60 bp, Homo sapiens
atgtacaggatgcagctgctgagctgcatcgccctgagcctggccctggtgaccaacagc

SEQ ID NO: 3045 - DNA, 60 bp, Homo sapiens
atgtacagaatgcagctgctgagctgcatcgccctgtccctcgccctggtgaccaactcc

SEQ ID NO: 3046 - DNA, 60 bp, Homo sapiens
atgtacaggatgcaactcctgtcttgcattgcactaagtcttgcacttgtcacaaacagt

SEQ ID NO: 3047 - protein, 21 aa, Homo sapiens
MDSYLLMWGLLTFIMVPGCQA

SEQ ID NO: 3048 - protein, 26 aa, Homo sapiens
MAAPALSWRLPLLILLLPLATSWASA

SEQ ID NO: 3049 - protein, 29 aa, Homo sapiens
MQTFTMVLEEIWTSLFMWFFYALIPCLLT

SEQ ID NO: 3050 - protein, 19 aa, Homo sapiens
MPRGWAAPLLLLLLQGGWG

SEQ ID NO: 3051 - protein, 33 aa, Homo sapiens
MAALQKSVSSFLMGTLATSCLLLLALLVQGGAA

SEQ ID NO: 3052 - protein, 21 aa, Homo sapiens
MMPKHCFLGFLISFFLTGVAG

SEQ ID NO: 3053 - protein, 51 aa, Homo sapiens
MNFQQRLQSLWTLARPFCPPLLATASQMQMVVLPCLGFTLLLWSQVSGAQG

SEQ ID NO: 3054 - protein, 32 aa, Homo sapiens
MRERPRLGEDSSLISLFLQVVAFLAMVMGTHT

SEQ ID NO: 3055 - protein, 19 aa, Homo sapiens
MSRLPVLLLLQLLVRPGLQ

SEQ ID NO: 3056 - protein, 19 aa, Homo sapiens
MMWTWALWMLPSLCKFSLA

SEQ ID NO: 3057 - protein, 24 aa, Homo sapiens
MGLTSQLLPPLFFLLACAGNFVHG

SEQ ID NO: 3058 - protein, 19 aa, Homo sapiens
MRMLLHLSLLALGAAYVYA

SEQ ID NO: 3059 - protein, 20 aa, Homo sapiens
MIIVAHVLLILLGATEILQA

SEQ ID NO: 3060 - protein, 29 aa, Homo sapiens
MNSFSTSAFGPVAFSLGLLLVLPAAFPAP

SEQ ID NO: 3061 - protein, 19 aa, Homo sapiens
MLAVGCALLAALLAAPGAA

SEQ ID NO: 3062 - protein, 22 aa, Homo sapiens
MLTLQTWLVQALFIFLTTESTG

SEQ ID NO: 3063 - protein, 25 aa, Homo sapiens
MFHVSFRYIFGLPPLILVLLPVASS

SEQ ID NO: 3064 - protein, 20 aa, Homo sapiens
MTILGTTFGMVFSLLQVVSG

SEQ ID NO: 3065 - protein, 20 aa, Homo sapiens
MTSKLAVALLAAFLISAALC

SEQ ID NO: 3066 - protein, 18 aa, Homo sapiens
MLLAMVLTSALLLCSVAG

SEQ ID NO: 3067 - protein, 17 aa, Homo sapiens
MMREWVLLMSVLLCGLA

SEQ ID NO: 3068 - protein, 19 aa, Homo sapiens
MHSFPPLLLLLFWGVVSHS

SEQ ID NO: 3069 - protein, 19 aa, Homo sapiens
MQGPWVLLLLGLRLQLSLG

SEQ ID NO: 3070 - protein, 27 aa, Homo sapiens
MGTKAQVERKLLCLFILAILLCSLALG

SEQ ID NO: 3071 - protein, 28 aa, Homo sapiens
MARRSRHRLLLLLLRYLVVALGYHKAYG

SEQ ID NO: 3072 - protein, 31 aa, Homo sapiens
MALRRPPRLRLCARLPDFFLLLLFRGCLIGA

SEQ ID NO: 3073 - protein, 19 aa, Homo sapiens
MFCPLKLILLPVLLDYSLG

SEQ ID NO: 3074 - protein, 22 aa, Homo sapiens
MARSLLLPLQILLLSLALETAG

SEQ ID NO: 3075 - protein, 20 aa, Homo sapiens
MKSFLLVVNALALTLPFLAV

SEQ ID NO: 3076 - protein, 30 aa, Homo sapiens
MLPPPRPAAALALPVLLLLLVVLTPPPTGA

SEQ ID NO: 3077 - protein, 31 aa, Homo sapiens
MHKWILTWILPTLLYRSCFHIICLVGTISLA

SEQ ID NO: 3078 - protein, 21 aa, Homo sapiens
MSLLVVSMACVGFFLLQGAWP

SEQ ID NO: 3079 - protein, 20 aa, Homo sapiens
MLRMRVPALLVLLFCFRGRA

SEQ ID NO: 3080 - protein, 18 aa, Homo sapiens
MKLITILFLCSRLLLSLT

SEQ ID NO: 3081 - protein, 25 aa, Homo sapiens
MKKTQTWILTCIYLQLLLFNPLVKT

SEQ ID NO: 3082 - protein, 23 aa, Homo sapiens
MEWWASSPLRLWLLLFLLPSAQG

SEQ ID NO: 3083 - protein, 35 aa, Homo sapiens
MAPARTMARARLAPAGIPAVALWLLCTLGLQGTQA

SEQ ID NO: 3084 - protein, 27 aa, Homo sapiens
MAQLCGLRRSRAFLALLGSLLLSGVLA

SEQ ID NO: 3085 - protein, 23 aa, Homo sapiens
MPRPRLLAALCGALLCAPSLLVA

SEQ ID NO: 3086 - protein, 21 aa, Homo sapiens
MKPVWVATLLWMLLLVPRLGA

SEQ ID NO: 3087 - protein, 19 aa, Homo sapiens
MELSWHVVFIALLSFSCWG

SEQ ID NO: 3088 - protein, 19 aa, Homo sapiens
MKLVFLVLLFLGALGLCLA

SEQ ID NO: 3089 - protein, 21 aa, Homo sapiens
MGLLQLLAFSFLALCRARVRA

SEQ ID NO: 3090 - protein, 33 aa, Homo sapiens
MRGSHRAAPALRPRGRLWPVLAVLAAAAAAGCA

SEQ ID NO: 3091 - protein, 21 aa, Homo sapiens
MAPLALHLLVLVPILLSLVAS

SEQ ID NO: 3092 - protein, 21 aa, Homo sapiens
MICQKFCVVLLHWEFIYVITA

SEQ ID NO: 3093 - protein, 35 aa, Homo sapiens
MSSWSRQRPKSPGGIQPHVSRTLFLLLLLAASAWG

SEQ ID NO: 3094 - protein, 25 aa, Homo sapiens
MARMSFVIAACQLVLGLLMTSLTES

SEQ ID NO: 3095 - protein, 35 aa, Homo sapiens
MGLQTTKWPSHGAFFLKSWLIISLGLYSQVSKLLA

SEQ ID NO: 3096 - protein, 47 aa, Homo sapiens
MGSLQHCCCLLPKMGDTWAQLPWPGPPHPAMLLISLLLAAGLMHSDA

SEQ ID NO: 3097 - protein, 22 aa, Homo sapiens
MKVLAAGVVPLLLVLHWKHGAG

SEQ ID NO: 3098 - protein, 23 aa, Homo sapiens
MYLWLKLLAFGFAFLDTEVFVTG

SEQ ID NO: 3099 - protein, 23 aa, Homo sapiens
MTPILTVLICLGLSLDPRTHVQA

SEQ ID NO: 3100 - protein, 19 aa, Homo sapiens
MATLLLLLGVLVVSPDALG

SEQ ID NO: 3101 - protein, 21 aa, Homo sapiens
MAQVKLQESGTELAKPGAAVK

SEQ ID NO: 3102 - protein, 18 aa, Artificial Sequence
  source: /note="Description of Artificial Sequence: Synthetic Signal Sequence"
MKPLLLAVSLGLIAALQA

SEQ ID NO: 3103 - protein, 25 aa, Homo sapiens
MGALARALPSILLALLLTSTPEALG

SEQ ID NO: 3104 - protein, 27 aa, Homo sapiens
MESKALLVLTLAVWLQSLTASRGGVAA

SEQ ID NO: 3105 - protein, 22 aa, Homo sapiens
MAQTSSYFMLISCLMFLSQSQG

SEQ ID NO: 3106 - protein, 18 aa, Homo sapiens
MWLRAFILATLSASAAWG

SEQ ID NO: 3107 - protein, 33 aa, Homo sapiens
MTMETQMSQNVCPRNLWLLQPLTVLLLLASADS

SEQ ID NO: 3108 - protein, 21 aa, Homo sapiens
MGPWGWKLRWTVALLLAAAGT

SEQ ID NO: 3109 - protein, 28 aa, Homo sapiens
MIFPWKCQSTQRDLWNIFKLWGWTMLCC

SEQ ID NO: 3110 - protein, 18 aa, Homo sapiens
MSLSAFTLFLALIGGTSG

SEQ ID NO: 3111 - protein, 31 aa, Homo sapiens
MEPPDAPAQARGAPRLLLLAVLLAAHPDAQA

SEQ ID NO: 3112 - protein, 20 aa, Homo sapiens
MEMLQGLLLLLLLSMGGAWA

SEQ ID NO: 3113 - protein, 25 aa, Homo sapiens
MAMGVPRVILLCLFGAALCLTGSQA

SEQ ID NO: 3114 - protein, 22 aa, Homo sapiens
MEPGPALAWLLLLSLLADCLKA

SEQ ID NO: 3115 - protein, 21 aa, Homo sapiens
MASRWAVQLLLVAAWSMGCGE

SEQ ID NO: 3116 - protein, 28 aa, Homo sapiens
MWEAQFLGLLFLQPLWVAPVKPLQPGAE

SEQ ID NO: 3117 - protein, 20 aa, Homo sapiens
MRTALLLLAALAVATGPALT

SEQ ID NO: 3118 - protein, 27 aa, Homo sapiens
MRTGWATPRRPAGLLMLLFWFFDLAEP

SEQ ID NO: 3119 - protein, 20 aa, Homo sapiens
MKGFTATLFLWTLIFPSCSG

SEQ ID NO: 3120 - protein, 28 aa, Homo sapiens
MVAGSDAGRALGVLSVVCLLHCFGFISC

SEQ ID NO: 3121 - protein, 34 aa, Homo sapiens
MTPPERLFLPRVCGTTLHLLLLGLLLVLLPGAQG

SEQ ID NO: 3122 - protein, 32 aa, Homo sapiens
MITGVFSMRLWTPVGVLTSLAYCLHQRRVALA

SEQ ID NO: 3123 - protein, 30 aa, Homo sapiens
MAGKRSGWSRAALLQLLLGVNLVVMPPTRA

SEQ ID NO: 3124 - protein, 49 aa, Homo sapiens
MGAYARASGVCARGCLDSAGPWTMSRALRPPLPPLCFFLLLLAAAGARA

SEQ ID NO: 3125 - protein, 28 aa, Homo sapiens
MIRAAPPPLFLLLLLLLLLVSWASRGEA

SEQ ID NO: 3126 - protein, 27 aa, Homo sapiens
MAPRSARRPLLLLLPVAAARPHALSSA

SEQ ID NO: 3127 - protein, 28 aa, Homo sapiens
MVCFRLFPVPGSGLVLVCLVLGAVRSYA

SEQ ID NO: 3128 - protein, 18 aa, Homo sapiens
MKALIVLGLVLLSVTVQG

SEQ ID NO: 3129 - protein, 32 aa, Homo sapiens
MTAPGAAGRCPPTTWLGSLLLLVCLLASRSIT

SEQ ID NO: 3130 - protein, 22 aa, Homo sapiens
MGELMAFLLPLIIVLMVKHSDS

SEQ ID NO: 3131 - protein, 18 aa, Homo sapiens
MKLLMVLMLAALLLHCYA

SEQ ID NO: 3132 - protein, 20 aa, Homo sapiens
MSLFPSLPLLLLSMVAASYS

SEQ ID NO: 3133 - protein, 15 aa, Homo sapiens
MRLILPVGLIATTLA

SEQ ID NO: 3134 - protein, 17 aa, Homo sapiens
MRLTVLCAVCLLPGSLA

SEQ ID NO: 3135 - protein, 19 aa, Homo sapiens
MKSLILLAILAALAVVTLC

SEQ ID NO: 3136 - protein, 19 aa, Homo sapiens
MSLWQPLVLVLLVLGCCFA

SEQ ID NO: 3137 - protein, 24 aa, Homo sapiens
MDLVLKRCLLHLAVIGALLAVGAT

SEQ ID NO: 3138 - protein, 24 aa, Homo sapiens
MARSLVCLGVIILLSAFSGPGVRG

SEQ ID NO: 3139 - protein, 19 aa, Homo sapiens
MRGPSGALWLLLALRTVLG

SEQ ID NO: 3140 - protein, 34 aa, Homo sapiens
MEPPGRRECPFPSWRFPGLLLAAMVLLLYSFSDA

SEQ ID NO: 3141 - protein, 17 aa, Artificial Sequence
  source: /note="Description of Artificial Sequence: Synthetic Signal Sequence"
MKLVNIWLLLLVVLLCG

SEQ ID NO: 3142 - protein, 36 aa, Homo sapiens
MALPTARPLLGSCGTPALGSLLFLLFSLGWVQPSRT

SEQ ID NO: 3143 - protein, 23 aa, Homo sapiens
MAPFEPLASGILLLLWLIAPSRA

SEQ ID NO: 3144 - protein, 26 aa, Homo sapiens
MGAAARTLRLALGLLLLATLLRPADA

SEQ ID NO: 3145 - protein, 23 aa, Homo sapiens
MTPWLGLIVLLGSWSLGDWGAEA

SEQ ID NO: 3146 - protein, 23 aa, Homo sapiens
MGLGPVFLLLAGIFPFAPPGAAA

SEQ ID NO: 3147 - protein, 21 aa, Homo sapiens
MKALLALPLLLLLSTPPCAPQ

SEQ ID NO: 3148 - protein, 20 aa, Homo sapiens
MQHRGFLLLTLLALLALTSA

SEQ ID NO: 3149 - protein, 20 aa, Homo sapiens
MKTLQSTLLLLLLVPLIKPA

SEQ ID NO: 3150 - protein, 19 aa, Homo sapiens
MERASCLLLLLLPLVHVSA

SEQ ID NO: 3151 - protein, 23 aa, Homo sapiens
MTPGTQSPFFLLLLLTVLTVVTG

SEQ ID NO: 3152 - protein, 20 aa, Homo sapiens
MKFLAVLVLLGVSIFLVSAQ

SEQ ID NO: 3153 - protein, 29 aa, Homo sapiens
MAPGAPSSSPSPILAVLLFSSLVLSPAQA

SEQ ID NO: 3154 - protein, 31 aa, Homo sapiens
MQQRGAAGSRGCALFPLLGVLFFQGVYIVFS

SEQ ID NO: 3155 - protein, 19 aa, Homo sapiens
MIFLTALPLFWIMISASRG

SEQ ID NO: 3156 - protein, 29 aa, Homo sapiens
MASLSRPSLPSCLCSFLLLLLLQVSSSYA

SEQ ID NO: 3157 - protein, 25 aa, Homo sapiens
MAHRPPSPALASVLLALLLSGAARA

SEQ ID NO: 3158 - protein, 48 aa, Homo sapiens
MGVPFFSSLRCMVDLGPCWAGGLTAEMKLLLALAGLLAILATPQPSEG

SEQ ID NO: 3159 - protein, 23 aa, Homo sapiens
MARKSNLPVLLVPFLLCQALVRC

SEQ ID NO: 3160 - protein, 26 aa, Homo sapiens
MAAVVAATRWWQLLLVLSAAGMGASG

SEQ ID NO: 3161 - protein, 36 aa, Homo sapiens
MRLLPLAPGRLRRGSPRHLPSCSPALLLLVLGGCLG

SEQ ID NO: 3162 - protein, 21 aa, Homo sapiens
MAQGVLWILLGLLLWSDPGTA

SEQ ID NO: 3163 - protein, 26 aa, Homo sapiens
MDPQTAPSRALLLLLFLHLAFLGGRS

SEQ ID NO: 3164 - protein, 21 aa, Homo sapiens
MLGQVVTLILLLLLKVYQGKG

SEQ ID NO: 3165 - protein, 19 aa, Homo sapiens
MAGPSLACCLLGLLALTSA

SEQ ID NO: 3166 - protein, 19 aa, Homo sapiens
MVVALRYVWPLLLCSPCLL

SEQ ID NO: 3167 - protein, 22 aa, Homo sapiens
MQLTRCCFVFLVQGSLYLVICG

SEQ ID NO: 3168 - protein, 15 aa, Homo sapiens
MLRVLVGAVLPAMLL

SEQ ID NO: 3169 - protein, 26 aa, Homo sapiens
MVSRMVSTMLSGLLFWLASGWTPAFA

SEQ ID NO: 3170 - protein, 41 aa, Homo sapiens
MSRPQGLLWLPLLFTPVCVMLNSNVLLWLTALAIKFTLIDS

SEQ ID NO: 3171 - protein, 24 aa, Homo sapiens
MARRAGGARMFGSLLLFALLAAGV

SEQ ID NO: 3172 - protein, 22 aa, Homo sapiens
MALERLCSVLKVLLITVLVVEG

SEQ ID NO: 3173 - protein, 21 aa, Homo sapiens
MERGLPLLCAVLALVLAPAGA

SEQ ID NO: 3174 - protein, 28 aa, Homo sapiens
MSGSSLPSALALSLLLVSGSLLPGPGAA

SEQ ID NO: 3175 - protein, 33 aa, Homo sapiens
MGVCGYLFLPWKCLVVVSLRLLFLVPTGVPVRS

SEQ ID NO: 3176 - protein, 20 aa, Homo sapiens
MFSLKTLPFLLLLHVQISKA

SEQ ID NO: 3177 - protein, 19 aa, Homo sapiens
MRTLAILAAILLVALQAQA

SEQ ID NO: 3178 - protein, 20 aa, Homo sapiens
MPLGLLWLGLALLGALHAQA

SEQ ID NO: 3179 - protein, 28 aa, Homo sapiens
MLASSSRIRAAWTRALLLPLLLAGPVGC

SEQ ID NO: 3180 - protein, 30 aa, Homo sapiens
MEGDRVAGRPVLSSLPVLLLLQLLMLRAAA

SEQ ID NO: 3181 - protein, 25 aa, Homo sapiens
MAAAAATKILLCLPLLLLLSGWSRA

SEQ ID NO: 3182 - protein, 34 aa, Homo sapiens
MESPSAPPHRWCIPWQRLLLTASLLTFWNPPTTA

SEQ ID NO: 3183 - protein, 27 aa, Homo sapiens
MVPKLFTSQICLLLLLGLLAVEGSLHV

SEQ ID NO: 3184 - protein, 19 aa, Homo sapiens
MRFLAATFLLLALSTAAQA

SEQ ID NO: 3185 - protein, 20 aa, Homo sapiens
MSCPVPACCALLLVLGLCRA

SEQ ID NO: 3186 - protein, 30 aa, Homo sapiens
DVSLCPAKCSFWRIFLLGSVWLDYVGSVLA

SEQ ID NO: 3187 - protein, 29 aa, Homo sapiens
MRAPGRPALRPLPLPPLLLLLLAAPWGRA

SEQ ID NO: 3188 - protein, 28 aa, Homo sapiens
MMVALRGASALLVLFLAAFLPPPQCTQD

SEQ ID NO: 3189 - protein, 24 aa, Homo sapiens
MEYQILKMSLCLFILLFLTPGILC

SEQ ID NO: 3190 - protein, 25 aa, Homo sapiens
MGVLLTQRTLLSLVLALLFPSMASM

SEQ ID NO: 3191 - protein, 17 aa, Homo sapiens
MARILLLFLPGLVAVCA

SEQ ID NO: 3192 - protein, 29 aa, Homo sapiens
MAAARLCLSLLLLSTCVALLLQPLLGAQG

SEQ ID NO: 3193 - protein, 23 aa, Homo sapiens
MKVTGIFLLSALALLSLSGNTGA

SEQ ID NO: 3194 - protein, 16 aa, Homo sapiens
MLPLWTLSLLLGAVAG

SEQ ID NO: 3195 - protein, 25 aa, Homo sapiens
MIPAKDMAKVMIVMLAICFLTKSDG

SEQ ID NO: 3196 - protein, 15 aa, Homo sapiens
MKWLLLLGLVALSEC

SEQ ID NO: 3197 - protein, 27 aa, Homo sapiens
MHGSCSFLMLLLPLLLLLVATTGPVGA

SEQ ID NO: 3198 - protein, 28 aa, Homo sapiens
MVFVRRPWPALTTVLLALLVCLGALVDA

SEQ ID NO: 3199 - protein, 20 aa, Homo sapiens
MGLPGLFCLAVLAASSFSKA

SEQ ID NO: 3200 - protein, 25 aa, Homo sapiens
MKVLLAAALIAGSVFFLLLPGPSAA

SEQ ID NO: 3201 - protein, 21 aa, Homo sapiens
MAARLLLLGILLLLLPLPVPA

SEQ ID NO: 3202 - protein, 24 aa, Homo sapiens
MGPPGSPWQWVTLLLGLLLPPAAP

SEQ ID NO: 3203 - protein, 22 aa, Homo sapiens
MGWTMRLVTAALLLGLMMVVTG

SEQ ID NO: 3204 - protein, 23 aa, Homo sapiens
MSAFRLWPGLLIMLGSLCHRGSP

SEQ ID NO: 3205 - protein, 21 aa, Homo sapiens
MLLAWVQAFLVSNMLLAEAYG

SEQ ID NO: 3206 - protein, 15 aa, Homo sapiens
MKLLVLAVLLTVAAA

SEQ ID NO: 3207 - protein, 20 aa, Homo sapiens
MKTLLLLAVIMIFGLLQAHG

SEQ ID NO: 3208 - protein, 17 aa, Homo sapiens
MALFGALFLALLAGAHA

SEQ ID NO: 3209 - protein, 18 aa, Homo sapiens
MPVMRLFPCFLQLLAGLA

SEQ ID NO: 3210 - protein, 18 aa, Homo sapiens
MRACISLVLAVLCGLAWA

SEQ ID NO: 3211 - protein, 19 aa, Homo sapiens
MILFKQATYFISLFATVSC

SEQ ID NO: 3212 - protein, 22 aa, Homo sapiens
MASRLTLLTLLLLLLAGDRASS

SEQ ID NO: 3213 - protein, 19 aa, Homo sapiens
MQLFLLLCLVLLSPQGASL

SEQ ID NO: 3214 - protein, 19 aa, Homo sapiens
MEHKEVVLLLLLFLKSGQG

SEQ ID NO: 3215 - protein, 23 aa, Homo sapiens
MQMSPALTCLVLGLALVFGEGSA

SEQ ID NO: 3216 - protein, 34 aa, Homo sapiens
MSLRLDTTPSCNSARPLHALQVLLLLSLLLTALA

SEQ ID NO: 3217 - protein, 27 aa, Homo sapiens
MQPRWAQGATMWLGVLLTLLLCSSLEG

SEQ ID NO: 3218 - protein, 31 aa, Homo sapiens
MSSAAGFCASRPGLLFLGLLLLPLVVAFASA

SEQ ID NO: 3219 - protein, 30 aa, Homo sapiens
MSSAARSRLTRATRQEMLFLALLLLPVVVA

SEQ ID NO: 3220 - protein, 16 aa, Homo sapiens
MPLLLLLLLLPSPLHP

SEQ ID NO: 3221 - protein, 26 aa, Homo sapiens
MGSGPRGALSLLLLLLAPPSRPAAGC

SEQ ID NO: 3222 - protein, 16 aa, Homo sapiens
MPAWGALFLLWATAEA

SEQ ID NO: 3223 - protein, 32 aa, Homo sapiens
MGVPTALEAGSWRWGSLLFALFLAASLGPVAA

SEQ ID NO: 3224 - protein, 21 aa, Homo sapiens
MVPPKLHVLFCLCGCLAVVYP

SEQ ID NO: 3225 - protein, 20 aa, Homo sapiens
MRTLACLLLLGCGYLAHVLA

SEQ ID NO: 3226 - protein, 20 aa, Homo sapiens
MNRCWALFLSLCCYLRLVSA

SEQ ID NO: 3227 - protein, 32 aa, Homo sapiens
MQAQQYQQQRRKFAAAFLAFIFILAAVDTAEA

SEQ ID NO: 3228 - protein, 18 aa, Homo sapiens
MLLFVLTCLLAVFPAIST

SEQ ID NO: 3229 - protein, 26 aa, Homo sapiens
MGLGARGAWAALLLGTLQVLALLGAA

SEQ ID NO: 3230 - protein, 25 aa, Homo sapiens
MRKDRLLHLCLVLLLILLSASDSNS

SEQ ID NO: 3231 - protein, 34 aa, Homo sapiens
MGTLSAPPCTQRIKWKGLLLTASLLNFWNLPTTA

SEQ ID NO: 3232 - protein, 34 aa, Homo sapiens
MGPLSAPPCTEHIKWKGLLVTASLLNFWNLPTTA

SEQ ID NO: 3233 - protein, 22 aa, Homo sapiens
MARAPPLLAALTALLAAAAAGG

SEQ ID NO: 3234 - protein, 16 aa, Homo sapiens
MYALFLLASLLGAALA

SEQ ID NO: 3235 - protein, 20 aa, Homo sapiens
MATPRGLGALLLLLLLPTSG

SEQ ID NO: 3236 - protein, 23 aa, Homo sapiens
MRGANAWAPLCLLLAAATQLSRQ

SEQ ID NO: 3237 - protein, 23 aa, Artificial Sequence
  source: /note="Description of Artificial Sequence: Synthetic Signal Sequence"
MKPIQKLLAGLILLTWCVEGCSS

SEQ ID NO: 3238 - protein, 19 aa, Homo sapiens
MIFLLLMLSLELQLHQIAA

SEQ ID NO: 3239 - protein, 19 aa, Homo sapiens
MRGATRVSIMLLLVTVSDC

SEQ ID NO: 3240 - protein, 27 aa, Homo sapiens
MRSLCCAPLLLLLLLPPLLLTPRAGDA

SEQ ID NO: 3241 - protein, 28 aa, Homo sapiens
MNIKGSPWKGSLLLLLVSNLLLCQSVAP

SEQ ID NO: 3242 - protein, 24 aa, Homo sapiens
MKENVASATVFTLLLFLNTCLLNG

SEQ ID NO: 3243 - protein, 28 aa, Homo sapiens
MRLLQLLFRASPATLLLVLCLQLGANKA

SEQ ID NO: 3244 - protein, 27 aa, Homo sapiens
MASSPWGCVCGLLLLLLPLLGTGPALG

SEQ ID NO: 3245 - protein, 17 aa, Homo sapiens
MIWYILIIGILLPQSLA

SEQ ID NO: 3246 - protein, 25 aa, Homo sapiens
MVSRKAVAALLVVHVAAMLASQTEA

SEQ ID NO: 3247 - protein, 28 aa, Homo sapiens
MLGNKRLGLSGLTLALSLLVCLGALAEA

SEQ ID NO: 3248 - protein, 27 aa, Homo sapiens
MITEGAQAPRLLLPPLLLLLTLPATGS

SEQ ID NO: 3249 - protein, 30 aa, Homo sapiens
MGTVSSRRSWWPLPLLLLLLLLLGPAGARA

SEQ ID NO: 3250 - protein, 35 aa, Homo sapiens
MGTVSSRRSWWPLPLLLLLLLLLGPAGARAQEDED

SEQ ID NO: 3251 - protein, 24 aa, Homo sapiens
MPRLFFFHLLGVCLLLNQFSRAVA

SEQ ID NO: 3252 - protein, 23 aa, Homo sapiens
MSRSLLLRFLLFLLLLPPLPVLL

SEQ ID NO: 3253 - protein, 22 aa, Homo sapiens
MATHHTLWMGLALLGVLGDLQA

SEQ ID NO: 3254 - protein, 20 aa, Homo sapiens
MKAVLLALLMAGLALQPGTA

SEQ ID NO: 3255 - protein, 17 aa, Homo sapiens
MWVPVVFLTLSVTWIGA

SEQ ID NO: 3256 - protein, 32 aa, Homo sapiens
MRAAPLLLARAASLSLGFLFLLFFWLDRSVLA

SEQ ID NO: 3257 - protein, 19 aa, Homo sapiens
MRSLGALLLLLSACLAVSA

SEQ ID NO: 3258 - protein, 21 aa, Homo sapiens
MWATQGLAVALALSVLPGSRA

SEQ ID NO: 3259 - protein, 31 aa, Homo sapiens
MAGLSRGSARALLAALLASTLLALLVSPARG

SEQ ID NO: 3260 - protein, 17 aa, Homo sapiens
MLRRALLCLAVAALVRA

SEQ ID NO: 3261 - protein, 24 aa, Homo sapiens
MRLRRLALFPGVALLLAAARLAAA

SEQ ID NO: 3262 - protein, 30 aa, Homo sapiens
MAGSRQRGLRARVRPLFCALLLSLGRFVRG

SEQ ID NO: 3263 - protein, 17 aa, Homo sapiens
MAVFLQLLPLLLSRAQG

SEQ ID NO: 3264 - protein, 21 aa, Homo sapiens
MESRVLLRTFCLIFGLGAVWG

SEQ ID NO: 3265 - protein, 31 aa, Homo sapiens
MQSVQSTSFCLRKQCLCLTFLLLHLLGQVAA

SEQ ID NO: 3266 - protein, 20 aa, Homo sapiens
MVYKTLFALCILTAGWRVQS

SEQ ID NO: 3267 - protein, 21 aa, Homo sapiens
MKVVPSLLLSVLLAQVWLVPG

SEQ ID NO: 3268 - protein, 22 aa, Homo sapiens
MASSIRRGRGAWTRLLSLLLLA

SEQ ID NO: 3269 - protein, 26 aa, Homo sapiens
MAVRELCFPRQRQVLFLFLFWGVSLA

SEQ ID NO: 3270 - protein, 41 aa, Homo sapiens
MANCQIAILYQRFQRVVFGISQLLCFSALISELTNQKEVAA

SEQ ID NO: 3271 - protein, 20 aa, Homo sapiens
MWLCPLALNLILMAASGAVC

SEQ ID NO: 3272 - protein, 20 aa, Homo sapiens
MWLCPLALNLILMAASGAAC

SEQ ID NO: 3273 - protein, 41 aa, Homo sapiens
MVGQMYCYPGSHLARALTRALALALVLALLVGPFLSGLAGA

SEQ ID NO: 3274 - protein, 19 aa, Homo sapiens
MRRLLEPCWWILFLKITSS

SEQ ID NO: 3275 - protein, 26 aa, Homo sapiens
MLPPMALPSVSWMLLSCLILLCQVQG

SEQ ID NO: 3276 - protein, 22 aa, Homo sapiens
MASRSMRLLLLLSCLAKTGVLG

SEQ ID NO: 3277 - protein, 25 aa, Homo sapiens
MARYMLLLLLAVWVLTGELWPGAEA

SEQ ID NO: 3278 - protein, 23 aa, Homo sapiens
MDGWRRMPRWGLLLLLWGSCTFG

SEQ ID NO: 3279 - protein, 26 aa, Homo sapiens
MELALRRSPVPRWLLLLPLLLGLNAG

SEQ ID NO: 3280 - protein, 18 aa, Homo sapiens
MKWVWALLLLAALGSGRA

SEQ ID NO: 3281 - protein, 28 aa, Homo sapiens
MALQRTHSLLLLLLLTLLGLGLVQPSYG

SEQ ID NO: 3282 - protein, 28 aa, Homo sapiens
MALEKSLVRLLLLVLILLVLGWVQPSLG

SEQ ID NO: 3283 - protein, 18 aa, Homo sapiens
MRPLLLLALLGWLLLAEA

SEQ ID NO: 3284 - protein, 16 aa, Homo sapiens
MLLILLSVALLAFSSA

SEQ ID NO: 3285 - protein, 28 aa, Homo sapiens
MGHHRPWLHASVLWAGVASLLLPPAMTQ

SEQ ID NO: 3286 - protein, 40 aa, Homo sapiens
MMLPQNSWHIDFGRCCCHQNLFSAVVTCILLLNSCFLISS

SEQ ID NO: 3287 - protein, 23 aa, Homo sapiens
MQLPLALCLVCLLVHTAFRVVEG

SEQ ID NO: 3288 - protein, 23 aa, Homo sapiens
MLPPAIHFYLLPLACILMKSCLA

SEQ ID NO: 3289 - protein, 20 aa, Homo sapiens
MKLMVLVFTIGLTLLLGVQA

SEQ ID NO: 3290 - protein, 31 aa, Homo sapiens
MGIGRSEGGRRGAALGVLLALGAALLAVGSA

SEQ ID NO: 3291 - protein, 24 aa, Homo sapiens
MLQGPGSLLLLFLASHCCLGSARG

SEQ ID NO: 3292 - protein, 32 aa, Homo sapiens
MVCGSPGGMLLLRAGLLALAALCLLRVPGARA

SEQ ID NO: 3293 - protein, 21 aa, Homo sapiens
MRLSVCLLMVSLALCCYQAHA

SEQ ID NO: 3294 - protein, 20 aa, Homo sapiens
MQPTLLLSLLGAVGLAAVNS

SEQ ID NO: 3295 - protein, 19 aa, Homo sapiens
MWRSLGLALALCLLPSGGT

SEQ ID NO: 3296 - protein, 38 aa, Homo sapiens
MGLRSWLAAPWGALPPRPPLLLLLLLLLLLQPPPPTWA

SEQ ID NO: 3297 - protein, 25 aa, Homo sapiens
MQTPRASPPRPALLLLLLLLGGAHG

SEQ ID NO: 3298 - protein, 23 aa, Artificial Sequence
  source: /note="Description of Artificial Sequence: Synthetic Signal Sequence"
MKPNIIFVLSLLLILEKQAAVMG

SEQ ID NO: 3299 - protein, 23 aa, Homo sapiens
MKSIILFVLSLLLILEKQAAVMG

SEQ ID NO: 3300 - protein, 27 aa, Homo sapiens
MMQKLLKCSRLVLALALILVLESSVQG

SEQ ID NO: 3301 - protein, 23 aa, Homo sapiens
MALSVLRLALLLLAVTFAASLIP

SEQ ID NO: 3302 - protein, 23 aa, Homo sapiens
MKLSGMFLLLSLALFCFLTGVFS

SEQ ID NO: 3303 - protein, 19 aa, Homo sapiens
MRLAVGALLVCAVLGLCLA

SEQ ID NO: 3304 - protein, 18 aa, Homo sapiens
MKWVTFISLLFLFSSAYS

SEQ ID NO: 3305 - protein, 18 aa, Homo sapiens
MKLLTGLVFCSLVLGVSS

SEQ ID NO: 3306 - protein, 18 aa, Homo sapiens
MRLFTGIVFCSLVMGVTS

SEQ ID NO: 3307 - protein, 19 aa, Homo sapiens
MNKPLLWISVLTSLLEAFA

SEQ ID NO: 3308 - protein, 29 aa, Homo sapiens
MESRGPLATSRLLLLLLLLLLRHTRQGWA

SEQ ID NO: 3309 - protein, 47 aa, Homo sapiens
MTGERPSTALPDRRWGPRILGFWGGCRVWVFAAIFLLLSLAASWSKA

SEQ ID NO: 3310 - protein, 18 aa, Homo sapiens
MFALGLPFLVLLVASVES

SEQ ID NO: 3311 - protein, 21 aa, Homo sapiens
MAQHHLWILLLCLQTWPEAAG

SEQ ID NO: 3312 - protein, 21 aa, Homo sapiens
MLWLFQSLLFVFCFGPGNVVS

SEQ ID NO: 3313 - protein, 22 aa, Homo sapiens
MAGSPTCLTLIYILWQLTGSAA

SEQ ID NO: 3314 - protein, 22 aa, Homo sapiens
MVMRPLWSLLLWEALLPITVTG

SEQ ID NO: 3315 - protein, 24 aa, Homo sapiens
MLSCRLQCALAALSIVLALGCVTG

SEQ ID NO: 3316 - protein, 26 aa, Homo sapiens
MATGSRTSLLLAFGLLCLPWLQEGSA

SEQ ID NO: 3317 - protein, 17 aa, Homo sapiens
MRAWIFFLLCLAGRALA

SEQ ID NO: 3318 - protein, 46 aa, Homo sapiens
MPRYGASLRQSCPRSGREQGQDGTAGAPGLLWMGLVLALALALALA

SEQ ID NO: 3319 - protein, 17 aa, Homo sapiens
MLQNSAVLLVLVISASA

SEQ ID NO: 3320 - protein, 19 aa, Homo sapiens
MKFLVFAFILALMVSMIGA

SEQ ID NO: 3321 - protein, 21 aa, Homo sapiens
MPLRKMKIPFLLLFFLWEAES

SEQ ID NO: 3322 - protein, 14 aa, Homo sapiens
MLVLGLLVAGAADG

SEQ ID NO: 3323 - protein, 22 aa, Artificial Sequence
  source: /note="Description of Artificial Sequence: Synthetic Signal Sequence"
MKSLTWILGLWALAACFTPGES

SEQ ID NO: 3324 - protein, 33 aa, Homo sapiens
MAAPALGLVCGRCPELGLVLLLLLLSLLCGAAG

SEQ ID NO: 3325 - protein, 19 aa, Homo sapiens
MGSGLPLVLLLTLLGSSHG

SEQ ID NO: 3326 - protein, 20 aa, Homo sapiens
MKSLSLLLAVALGLATAVSA

SEQ ID NO: 3327 - protein, 18 aa, Homo sapiens
MGTQEGWCLLLCLALSGA

SEQ ID NO: 3328 - protein, 21 aa, Homo sapiens
MDMWTALLILQALLLPSLADG

SEQ ID NO: 3329 - protein, 25 aa, Homo sapiens
MAGPPRLLLLPLLLALARGLPGALA

SEQ ID NO: 3330 - protein, 27 aa, Homo sapiens
MAMLLGASVLILWLQPDWVNSQQKNDD

SEQ ID NO: 3331 - protein, 20 aa, Homo sapiens
IFASLLRAVIASICVVSSMA

SEQ ID NO: 3332 - protein, 20 aa, Homo sapiens
MLLLLVPVLEVIFTLGGTRA

SEQ ID NO: 3333 - protein, 21 aa, Homo sapiens
MGTSLLCWMALCLLGADHADT

SEQ ID NO: 3334 - protein, 20 aa, Homo sapiens
MRWALLVLLAFLSPASQKSS

SEQ ID NO: 3335 - protein, 24 aa, Homo sapiens
MSFPCKFVASFLLIFNVSSKGAVS

SEQ ID NO: 3336 - protein, 16 aa, Homo sapiens
MLFLLLPLLAVLPGDG

SEQ ID NO: 3337 - protein, 19 aa, Homo sapiens
MLLLFLLFEGLCCPGENTA

SEQ ID NO: 3338 - protein, 21 aa, Homo sapiens
MEHSTFLSGLVLATLLSQVSP

SEQ ID NO: 3339 - protein, 22 aa, Homo sapiens
MQSGTHWRVLGLCLLSVGVWGQ

SEQ ID NO: 3340 - protein, 22 aa, Homo sapiens
MEQGKGLAVLILAIILLQGTLA

SEQ ID NO: 3341 - protein, 21 aa, Homo sapiens
MKWKALFTAAILQAQLPITEA

SEQ ID NO: 3342 - protein, 25 aa, Homo sapiens
MNRGVPFRHLLLVLQLALLPAATQG

SEQ ID NO: 3343 - protein, 24 aa, Homo sapiens
MPMGSLQPLATLYLLGMLVASCLG

SEQ ID NO: 3344 - protein, 21 aa, Homo sapiens
MRPRLWLLLAAQLTVLHGNSV

SEQ ID NO: 3345 - protein, 18 aa, Homo sapiens
MLRLLLALNLFPSIQVTG

SEQ ID NO: 3346 - protein, 22 aa, Homo sapiens
MGAMTQLLAGVFLAFLALATEG

SEQ ID NO: 3347 - protein, 30 aa, Homo sapiens
MDCRKMARFSYSVIWIMAISKVFELGLVAG

SEQ ID NO: 3348 - protein, 22 aa, Homo sapiens
MRAPGCGRLVLPLLLLAAAALA

SEQ ID NO: 3349 - protein, 21 aa, Homo sapiens
MELWGAYLLLCLFSLLTQVTT

SEQ ID NO: 3350 - protein, 22 aa, Homo sapiens
MGRGLLRGLWPLHIVLWTRIAS

SEQ ID NO: 3351 - protein, 26 aa, Homo sapiens
METRPRLGATCLLGFSFLLLVISSDG

SEQ ID NO: 3352 - protein, 29 aa, Homo sapiens
MHPAVFLSLPDLRCSLLLLVTWVFTPVTT

SEQ ID NO: 3353 - protein, 18 aa, Homo sapiens
MLGVLVLGALALAGLGFP

SEQ ID NO: 3354 - protein, 21 aa, Homo sapiens
MELTELLLVVMLLLTARLTLS

SEQ ID NO: 3355 - protein, 18 aa, Homo sapiens
MGLAWGLGVLFLMHVCGT

SEQ ID NO: 3356 - protein, 19 aa, Homo sapiens
MNLAISIALLLTVLQVSRG

SEQ ID NO: 3357 - protein, 19 aa, Homo sapiens
MALVLEIFTLLASICWVSA

SEQ ID NO: 3358 - protein, 20 aa, Homo sapiens
MRPADLLQLVLLLDLPRDLG

SEQ ID NO: 3359 - protein, 20 aa, Homo sapiens
MTALFLMSMLFGLACGQAMS

SEQ ID NO: 3360 - protein, 20 aa, Homo sapiens
MSPFLYLVLLVLGLHATIHC

SEQ ID NO: 3361 - protein, 32 aa, Homo sapiens
METPAWPRVPRPETAVARTLLLGWVFAQVAGA

SEQ ID NO: 3362 - protein, 28 aa, Homo sapiens
MIYTMKKVHALWASVCLLLNLAPAPLNA

SEQ ID NO: 3363 - protein, 22 aa, Homo sapiens
MDPARPLGLSILLLFLTEAALG

SEQ ID NO: 3364 - protein, 22 aa, Homo sapiens
MDAMKRGLCCVLLLCGAVFVSP

SEQ ID NO: 3365 - protein, 34 aa, Homo sapiens
MGHTRRQGTSPSKCPYLNFFQLLVLAGLSHFCSG

SEQ ID NO: 3366 - protein, 37 aa, Homo sapiens
MAAAWPSGPSAPEAVTARLVGVLWFVSVTTGPWGAVA

SEQ ID NO: 3367 - protein, 24 aa, Homo sapiens
MTSIFHFAIIFMLILQIRIQLSEE

SEQ ID NO: 3368 - protein, 23 aa, Homo sapiens
MRQTLPCIYFWGGLLPFGMLCAS

SEQ ID NO: 3369 - protein, 23 aa, Homo sapiens
MMSASRLAGTLIPAMAFLSCVRP

SEQ ID NO: 3370 - protein, 20 aa, Homo sapiens
MGDHLDLLLGVVLMAGPVFG

SEQ ID NO: 3371 - protein, 40 aa, Homo sapiens
MVLWESPRQCSSWTLCEGFCWLLLLPVMLLIVARPVKLAA

SEQ ID NO: 3372 - protein, 23 aa, Homo sapiens
MRQSHQLPLVGLLLFSFIPSQLC

SEQ ID NO: 3373 - protein, 18 aa, Homo sapiens
MRHLGAFLFLLGVLGALT

SEQ ID NO: 3374 - protein, 29 aa, Homo sapiens
MPPSGLRLLLLLLPLLWLLVLTPGRPAAG

SEQ ID NO: 3375 - protein, 18 aa, Homo sapiens
MRLLPRLLLLLLLVFPAT

SEQ ID NO: 3376 - protein, 22 aa, Homo sapiens
MGSPGMVLGLLVQIWALQEASS

SEQ ID NO: 3377 - protein, 26 aa, Homo sapiens
MALPPGPAALRHTLLLLPALLSSGWG

SEQ ID NO: 3378 - protein, 33 aa, Homo sapiens
MWGARRSSVSSSWNAASLLQLLLAALLAAGARA

SEQ ID NO: 3379 - protein, 30 aa, Homo sapiens
MAAACGPGAAGYCLLLGLHLFLLTAGPALG

SEQ ID NO: 3380 - protein, 33 aa, Homo sapiens
MATLWGGLLRLGSLLSLSCLALSVLLLAQLSDA

SEQ ID NO: 3381 - protein, 20 aa, Homo sapiens
MASHRLLLLCLAGLVFVSEA

SEQ ID NO: 3382 - protein, 24 aa, Homo sapiens
MATMENKVICALVLVSMLALGTLA

SEQ ID NO: 3383 - protein, 21 aa, Homo sapiens
MAARALCMLGLVLALLSSSSA

SEQ ID NO: 3384 - protein, 19 aa, Homo sapiens
MGLQACLLGLFALILSGKC

SEQ ID NO: 3385 - protein, 15 aa, Homo sapiens
MNPLLILTFVAAALA

SEQ ID NO: 3386 - protein, 15 aa, Homo sapiens
MNLLLILTFVAAAVA

SEQ ID NO: 3387 - protein, 21 aa, Homo sapiens
MWRCPLGLLLLLPLAGHLALG

SEQ ID NO: 3388 - protein, 55 aa, Homo sapiens
MEQRGQNAPAASGARKRHGPGPREARGARPGPRVPKTLVLVVAAVLLLVSAESAL

SEQ ID NO: 3389 - protein, 23 aa, Homo sapiens
MARIPKTLKFVVVIVAVLLPVLA

SEQ ID NO: 3390 - protein, 55 aa, Homo sapiens
MGLWGQSVPTASSARAGRYPGARTASGTRPWLLDPKILKFVVFIVAVLLPVRVDS

SEQ ID NO: 3391 - protein, 21 aa, Homo sapiens
MNKLLCCALVFLDISIKWTTQ

SEQ ID NO: 3392 - protein, 38 aa, Homo sapiens
MEPPGDWGPPPWRSTPKTDVLRLVLYLTFLGAPCYAPA

SEQ ID NO: 3393 - protein, 28 aa, Homo sapiens
MGAGATGRAMDGPRLLLLLLLGVSLGGA

SEQ ID NO: 3394 - protein, 25 aa, Homo sapiens
MAQHGAMGAFRALCGLALLCALSLG

SEQ ID NO: 3395 - protein, 29 aa, Homo sapiens
MALKVLLEQEKTFFTLLVLLGYLSCKVTC

SEQ ID NO: 3396 - protein, 25 aa, Artificial Sequence
  source: /note="Description of Artificial Sequence: Synthetic Signal Sequence"
MKPSLLCRPLSCFLMLLPWPLATLT

SEQ ID NO: 3397 - protein, 21 aa, Homo sapiens
MGLSTVPDLLLPLVLLELLVG

SEQ ID NO: 3398 - protein, 22 aa, Homo sapiens
MAPVAVWAALAVGLELWAAAHA

SEQ ID NO: 3399 - protein, 20 aa, Homo sapiens
MVRLPLQCVLWGCLLTAVHP

SEQ ID NO: 3400 - protein, 29 aa, Homo sapiens
MRALEGPGLSLLCLVLALPALLPVPAVRG

SEQ ID NO: 3401 - protein, 18 aa, Homo sapiens
MRVLLAALGLLFLGALRA

SEQ ID NO: 3402 - protein, 23 aa, Homo sapiens
MGNSCYNIVATLLLVLNFERTRS

SEQ ID NO: 3403 - protein, 26 aa, Homo sapiens
MAHVGDCTQTPWLPVLVVSLMCSARA

SEQ ID NO: 3404 - protein, 17 aa, Homo sapiens
MIILIYLFLLLWEDTQG

SEQ ID NO: 3405 - protein, 21 aa, Homo sapiens
MVWRVPPFLLPILFLASHVGA

SEQ ID NO: 3406 - protein, 23 aa, Homo sapiens
MDSLRKMLISVAMLGAGAGVGYA

SEQ ID NO: 3407 - protein, 22 aa, Homo sapiens
MGHPPLLPLLLLLHTCVPASWG

SEQ ID NO: 3408 - protein, 20 aa, Homo sapiens
MRALLARLLLCVLVVSDSKG

SEQ ID NO: 3409 - protein, 24 aa, Homo sapiens
MGQPSLTWMLMVVVASWFITTAAT

SEQ ID NO: 3410 - protein, 20 aa, Homo sapiens
MYKLASCCLLFIGFLNPLLS

SEQ ID NO: 3411 - protein, 21 aa, Homo sapiens
MKLAVTLTLVTLALCCSSASA

SEQ ID NO: 3412 - protein, 37 aa, Homo sapiens
MVAVLGGRGVLRLRLLLSALKPGIHVPRAGPAAAFGT

SEQ ID NO: 3413 - protein, 24 aa, Homo sapiens
MPGKMVVILGASNILWIMFAASQA

SEQ ID NO: 3414 - protein, 26 aa, Homo sapiens
MNFLLSWVHWSLALLLYLHHAKWSQA

SEQ ID NO: 3415 - protein, 31 aa, Homo sapiens
MHLLGFFSVACSLLAAALLPGPREAPAAAAA

SEQ ID NO: 3416 - protein, 26 aa, Homo sapiens
MVSYWDTGVLLCALLSCLLLTGSSSG

SEQ ID NO: 3417 - protein, 24 aa, Homo sapiens
MQRGAALCLRLWLCLGLLDGLVSG

SEQ ID NO: 3418 - protein, 19 aa, Homo sapiens
MPDTMLPACFLGLLAFSSA

SEQ ID NO: 3419 - protein, 21 aa, Homo sapiens
MKVLISSLLLLLPLMLMSMVS

SEQ ID NO: 3420 - protein, 20 aa, Homo sapiens
MFINIKSILWMCSTLIVTHA

SEQ ID NO: 3421 - protein, 16 aa, Homo sapiens
MKRVLVLLLAVAFGHA

SEQ ID NO: 3422 - protein, 32 aa, Homo sapiens
MWQLTSLLLFVATWGISGTPAPLDSVFSSSER

SEQ ID NO: 3423 - protein, 24 aa, Homo sapiens
MRVLGGRCGALLACLLLVLPVSEA

SEQ ID NO: 3424 - protein, 23 aa, Homo sapiens
MAGCVPLLQGLVLVLALHRVEPS

SEQ ID NO: 3425 - protein, 24 aa, Homo sapiens
MERGAGAKLLPLLLLLRATGFTCA

SEQ ID NO: 3426 - protein, 19 aa, Homo sapiens
MAPLRPLLILALLAWVALA

SEQ ID NO: 3427 - protein, 22 aa, Homo sapiens
MIPARFAGVLLALALILPGTLC

SEQ ID NO: 3428 - protein, 23 aa, Homo sapiens
MAELPGPFLCGALLGFLCLSGLA

SEQ ID NO: 3429 - protein, 19 aa, Homo sapiens
MGILLGLLLLGHLTVDTYG

SEQ ID NO: 3430 - protein, 16 aa, Artificial Sequence
  source: /note="Description of Artificial Sequence: Synthetic Signal Sequence"
MTAEFLSLLCLGLCLG

SEQ ID NO: 3431 - protein, 23 aa, Homo sapiens
MRGTPKTHLLAFSLLCLLSKVRT

SEQ ID NO: 3432 - protein, 28 aa, Homo sapiens
MARKLSVILILTFALSVTNPLHELKAAA

SEQ ID NO: 3433 - protein, 17 aa, Homo sapiens
MVPVLLSLLLLLGPAVP

SEQ ID NO: 3434 - protein, 38 aa, Homo sapiens
MACRQRGGSWSPSGWFNAGWSTYRSISLFFALVTSGNS

SEQ ID NO: 3435 - protein, 16 aa, Homo sapiens
MLTVALLALLCASASG

SEQ ID NO: 3436 - protein, 9 aa, Homo sapiens
SARNRQKRS

SEQ ID NO: 3437 - DNA, 27 bp, Homo sapiens
agcgccaggaatcgccagaagcggtcc

SEQ ID NO: 3438 - protein, 8 aa, Homo sapiens
ARNRQKRS

SEQ ID NO: 3439 - DNA, 24 bp, Homo sapiens
gcccggaatagacagaagagatct

SEQ ID NO: 3440 - protein, 12 aa, Artificial Sequence
  source: /note="Description of Artificial Sequence: Synthetic Cleavage site sequence"
ESRRVRRNKRSK

SEQ ID NO: 3441 - DNA, 36 bp, Artificial Sequence
  source: /note="Description of Artificial Sequence: Synthetic Cleavage site sequence"
gagtctaggcgcgtgcggagaaataagcggagcaag

SEQ ID NO: 3442 - DNA, 36 bp, Artificial Sequence
  source: /note="Description of Artificial Sequence: Synthetic Cleavage site sequence"
gagtctcggagagtgaggcgcaataagaggagcaag

SEQ ID NO: 3443 - DNA, 36 bp, Artificial Sequence
  source: /note="Description of Artificial Sequence: Synthetic Cleavage site sequence"
gagtccaggagagtgcggcgcaacaagaggagcaag

SEQ ID NO: 3444 - DNA, 36 bp, Artificial Sequence
  source: /note="Description of Artificial Sequence: Synthetic Cleavage site sequence"
gagtccaggagagtgcggcgcaacaagcggtctaag

SEQ ID NO: 3445 - DNA, 36 bp, Artificial Sequence
  source: /note="Description of Artificial Sequence: Synthetic Cleavage site sequence"
gagtctcggcgcgtgaggagaaataagagaagcaag

SEQ ID NO: 3446 - DNA, 36 bp, Artificial Sequence
  source: /note="Description of Artificial Sequence: Synthetic Cleavage site sequence"
gagtctaggagagtgcggcgcaataagagaagcaag

SEQ ID NO: 3447 - protein, 14 aa, Artificial Sequence
  source: /note="Description of Artificial Sequence: Synthetic Cleavage site sequence"
SGESRRVRRNKRSK

SEQ ID NO: 3448 - DNA, 42 bp, Artificial Sequence
  source: /note="Description of Artificial Sequence: Synthetic Cleavage site sequence"
agtggtgagtccaggagagtgcggcgcaacaagaggagcaag

SEQ ID NO: 3449 - protein, 19 aa, Artificial Sequence
  source: /note="Description of Artificial Sequence: Synthetic Cleavage site sequence"
ATNFSLLKQAGDVEENPGP

SEQ ID NO: 3450 - DNA, 57 bp, Artificial Sequence
  source: /note="Description of Artificial Sequence: Synthetic Cleavage site sequence"
gctactaacttcagcctgctgaagcaggctggagacgtggaggagaaccctggacct

SEQ ID NO: 3451 - DNA, 57 bp, Artificial Sequence
  source: /note="Description of Artificial Sequence: Synthetic Cleavage site sequence"
gcaaccaattttagtctacttaaacaagcaggtgatgtagaagaaaatccaggtcca

SEQ ID NO: 3452 - protein, 20 aa, Artificial Sequence
  source: /note="Description of Artificial Sequence: Synthetic Cleavage site sequence"
GATNFSLLKQAGDVEENPGP

SEQ ID NO: 3453 - DNA, 60 bp, Artificial Sequence
  source: /note="Description of Artificial Sequence: Synthetic Cleavage site sequence"
ggagctactaacttcagcctgctgaagcaggctggagacgtggaggagaaccctggacct

SEQ ID NO: 3454 - protein, 5 aa, Unknown
  source: /note="Description of Unknown: Granzyme B sequence"
  MOD_RES (5)..(5): Any amino acid
IEPDX

SEQ ID NO: 3455 - protein, 5 aa, Unknown
  source: /note="Description of Unknown: Enterokinase sequence"
DDDDK

SEQ ID NO: 3456 - protein, 6 aa, Unknown
  source: /note="Description of Unknown: Genenase sequence"
PGAAHY

SEQ ID NO: 3457 - protein, 7 aa, Unknown
  source: /note="Description of Unknown: PreScission protease sequence"
LEVFQGP

SEQ ID NO: 3458 - protein, 6 aa, Unknown
  source: /note="Description of Unknown: Thrombin sequence"
LVPRGS

SEQ ID NO: 3459 - protein, 7 aa, Unknown
  source: /note="Description of Unknown: TEV protease sequence"
ENLYFQG

SEQ ID NO: 3460 - protein, 4 aa, Artificial Sequence
  source: /note="Description of Artificial Sequence: Synthetic peptide"
RTKR

SEQ ID NO: 3461 - DNA, 12 bp, Artificial Sequence
  source: /note="Description of Artificial Sequence: Synthetic Cleavage site sequence"
agaacgaagaga

SEQ ID NO: 3462 - protein, 20 aa, Artificial Sequence
  source: /note="Description of Artificial Sequence: Synthetic peptide"
GTGAEDPRPSRKRRSLGDVG

SEQ ID NO: 3463 - protein, 14 aa, Artificial Sequence
  source: /note="Description of Artificial Sequence: Synthetic peptide"
GTGAEDPRPSRKRR

SEQ ID NO: 3464 - protein, 15 aa, Artificial Sequence
  source: /note="Description of Artificial Sequence: Synthetic peptide"
LQWLEQQVAKRRTKR

SEQ ID NO: 3465 - protein, 18 aa, Artificial Sequence
  source: /note="Description of Artificial Sequence: Synthetic peptide"
GTGAEDPRPSRKRRSLGG

SEQ ID NO: 3466 - protein, 17 aa, Artificial Sequence
  source: /note="Description of Artificial Sequence: Synthetic peptide"
GTGAEDPRPSRKRRSLG

SEQ ID NO: 3467 - protein, 14 aa, Artificial Sequence
  source: /note="Description of Artificial Sequence: Synthetic peptide"
SLNLTESHNSRKKR

SEQ ID NO: 3468 - protein, 14 aa, Artificial Sequence
  source: /note="Description of Artificial Sequence: Synthetic peptide"
CKINGYPKRGRKRR

SEQ ID NO: 3469 - protein, 4 aa, Artificial Sequence
  source: /note="Description of Artificial Sequence: Synthetic peptide"
RGDS

SEQ ID NO: 3470 - protein, 8 aa, Artificial Sequence
  source: /note="Description of Artificial Sequence: Synthetic peptide"
SARNRRKR

SEQ ID NO: 3471 - protein, 21 aa, Artificial Sequence
  source: /note="Description of Artificial Sequence: Synthetic peptide"
GSGEGRGSLLTCGDVEENPGP

SEQ ID NO: 3472 - protein, 22 aa, Artificial Sequence
  source: /note="Description of Artificial Sequence: Synthetic peptide"
GSGATNFSLLKQAGDVEENPGP

SEQ ID NO: 3473 - protein, 23 aa, Artificial Sequence
  source: /note="Description of Artificial Sequence: Synthetic peptide"
GSGQCTNYALLKLAGDVESNPGP

SEQ ID NO: 3474 - protein, 25 aa, Artificial Sequence
  source: /note="Description of Artificial Sequence: Synthetic peptide"
GSGVKQTLNFDLLKLAGDVESNPGP

SEQ ID NO: 3475 - protein, 15 aa, Artificial Sequence
  source: /note="Description of Artificial Sequence: Synthetic Tag"
GLNDIFEAQKIEWHE

SEQ ID NO: 3476 - protein, 130 aa, Artificial Sequence
  source: /note="Description of Artificial Sequence: Synthetic Tag"
MLRKFKISIDGKEYLVEMEEISESSVPAATPITPTTENTRAASDQKQQSQTPSPAATASAANTMPAPMPGTILKVLVNVGDTVSENQPLMILEAMKMENEIVAGMAGTVSAIHVSSGQTVNAGDNLITIA

SEQ ID NO: 3477 - protein, 26 aa, Artificial Sequence
  source: /note="Description of Artificial Sequence: Synthetic Tag"
KRRWKKNFIAVSAANRFKKISSSGAL

SEQ ID NO: 3478 - protein, 50 aa, Artificial Sequence
  source: /note="Description of Artificial Sequence: Synthetic Tag"
TNPGVSAWQVNTAYTAQLVTYNGKTYKCLQPHTSLAGWEPSNVPALWQLQ

SEQ ID NO: 3479 - protein, 13 aa, Artificial Sequence
  source: /note="Description of Artificial Sequence: Synthetic Tag"
GAPVPYPDPLEPR

SEQ ID NO: 3480 - protein, 296 aa, Artificial Sequence
  source: /note="Description of Artificial Sequence: Synthetic Tag"
MLLWTAVLFLAPVAGTPAAPPKAVLKLEPQWINVLQEDSVTLTCRGTHSPESDSIQWFHNGNLIPTHTQPSYRFKANNNDSGEYTCQTGQTSLSDPVHLTVLSEWLVLQTPHLEFQEGETIVLRCHSWKDKPLVKVTFFQNGKSKKFSRSDPNFSIPQANHSHSGDYHCTGNIGYTLYSSKPVTITVQAPSSSPMGIIVAVVTGIAVAAIVAAVVALIYCRKKRISANSTDPVKAAQFEPPGRQMIAIRKRQPEETNNDYETADGGYMTLNPRAPTDDDKNIYLTLPPNDHVNSNN

SEQ ID NO: 3481 - protein, 8 aa, Artificial Sequence
  source: /note="Description of Artificial Sequence: Synthetic Tag"
DYKDDDDK

SEQ ID NO: 3482 - DNA, 24 bp, Artificial Sequence
  source: /note="Description of Artificial Sequence: Synthetic Tag"
gactacaaagacgatgacgacaag

SEQ ID NO: 3483 - DNA, 24 bp, Artificial Sequence
  source: /note="Description of Artificial Sequence: Synthetic Tag"
gactacaaggacgatgacgacaag

SEQ ID NO: 3484 - DNA, 24 bp, Artificial Sequence
  source: /note="Description of Artificial Sequence: Synthetic Tag"
gattataaagatgatgatgataaa

SEQ ID NO: 3485 - DNA, 24 bp, Artificial Sequence
  source: /note="Description of Artificial Sequence: Synthetic Tag"
gattataaagacgacgatgataag

SEQ ID NO: 3486 - protein, 238 aa, Artificial Sequence
  source: /note="Description of Artificial Sequence: Synthetic Tag"
MSKGEELFTGVVPILVELDGDVNGHKFSVSGEGEGDATYGKLTLKFICTTGKLPVPWPTLVTTFAYGVQCFSRYPDHMKRHDFFKSAMPEGYVQERTIFFKDDGNYKTRAEVKFEGDTLVNRIELKGIDFKEDGNILGHKLEYNYNSHNVYIMADKQKNGIKVNFKIRHNIEDGSVQLADHYQQNTPIGDGPVLLPDNHYLSTQSVLSKDPNEKRDHMVLLEFVTAAGITHGMDELYK

SEQ ID NO: 3487 - protein, 239 aa, Artificial Sequence
  source: /note="Description of Artificial Sequence: Synthetic Tag"
MVSKGEELFTGVVPILVELDGDVNGHKFSVSGEGEGDATYGKLTLKFICTTGKLPVPWPTLVTTLTWGVQCFSRYPDHMKQHDFFKSAMPEGYVQERTIFFKDDGNYKTRAEVKFEGDTLVNRIELKGIDFKEDGNILGHKLEYNYISHNVYITADKQKNGIKANFKIRHNIEDGSVQLADHYQQNTPIGDGPVLLPDNHYLSTQSALSKDPNEKRDHMVLLEFVTAAGITLGMDELYK

SEQ ID NO: 3488 - protein, 225 aa, Artificial Sequence
  source: /note="Description of Artificial Sequence: Synthetic Tag"
MASSEDVIKEFMRFKVRMEGSVNGHEFEIEGEGEGRPYEGTQTAKLKVTKGGPLPFAWDILSPQFQYGSKAYVKHPADIPDYLKLSFPEGFKWERVMNFEDGGVVTVTQDSSLQDGEFIYKVKLRGTNFPSDGPVMQKKTMGWEASTERMYPEDGALKGEIKMRLKLKDGGHYDAEVKTTYMAKKPVQLPGAYKTDIKLDITSHNEDYTIVEQYERAEGRHSTGA

SEQ ID NO: 3489 - protein, 239 aa, Artificial Sequence
  source: /note="Description of Artificial Sequence: Synthetic Tag"
MVSKGEELFTGVVPILVELDGDVNGHKFSVSGEGEGDATYGKLTLKFICTTGKLPVPWPTLVTTFGYGLQCFARYPDHMKQHDFFKSAMPEGYVQERTIFFKDDGNYKTRAEVKFEGDTLVNRIELKGIDFKEDGNILGHKLEYNYNSHNVYIMADKQKNGIKVNFKIRHNIEDGSVQLADHYQQNTPIGDGPVLLPDNHYLSYQSALSKDPNEKRDHMVLLEFVTAAGITLGMDELYK

SEQ ID NO: 3490 - protein, 201 aa, Artificial Sequence
  source: /note="Description of Artificial Sequence: Synthetic Tag"
MKLFYKPGACSLASHITLRESGKDFTLVSVDLMKKRLENGDNYFAVNPKGQVPALLLDDGTLLTEGVAIMQYLADSVPDRQLLAPVNSISRYKTIEWLNYIATELHKGFTPLFRPDTPEEYKSTVRAQLEKKLQYVNEALKDEHWICGQRFTIADAYLFTVLRWAYAVKLNLEGLEHIAAFMQRMAERPEVQDALSAEGLK

SEQ ID NO: 3491 - protein, 90 aa, Artificial Sequence
  source: /note="Description of Artificial Sequence: Synthetic Tag"
MVARTLSATTGELPSRGCSRRIVPISSASDGVHALVLHQRAIGSAGVDATAHYVSGPYRRETLVGTSHWIPDEEPEKLARLVLEHIAAHG

SEQ ID NO: 3492 - protein, 19 aa, Artificial Sequence
  source: /note="Description of Artificial Sequence: Synthetic Tag"
KDHLIHNVHKEFHAHAHNK

SEQ ID NO: 3493 - protein, 9 aa, Artificial Sequence
  source: /note="Description of Artificial Sequence: Synthetic Tag"
YPYDVPDYA

SEQ ID NO: 3494 - DNA, 27 bp, Artificial Sequence
  source: /note="Description of Artificial Sequence: Synthetic Tag"
tacccatacgatgttccagattacgct

SEQ ID NO: 3495 - DNA, 27 bp, Artificial Sequence
  source: /note="Description of Artificial Sequence: Synthetic Tag"
tatccttacgatgtgcccgactatgct

SEQ ID NO: 3496 - DNA, 27 bp, Artificial Sequence
  source: /note="Description of Artificial Sequence: Synthetic Tag"
tatccgtacgacgtaccagactacgca

SEQ ID NO: 3497 - protein, 16 aa, Artificial Sequence
  source: /note="Description of Artificial Sequence: Synthetic Tag"
TDKDMTITFTNKKDAE

SEQ ID NO: 3498 - protein, 396 aa, Artificial Sequence
  source: /note="Description of Artificial Sequence: Synthetic Tag"
MKIKTGARILALSALTTMMFSASALAKIEEGKLVIWINGDKGYNGLAEVGKKFEKDTGIKVTVEHPDKLEEKFPQVAATGDGPDIIFWAHDRFGGYAQSGLLAEITPDKAFQDKLYPFTWDAVRYNGKLIAYPIAVEALSLIYNKDLLPNPPKTWEEIPALDKELKAKGKSALMFNLQEPYFTWPLIAADGGYAFKYENGKYDIKDVGVDNAGAKAGLTFLVDLIKNKHMNADTDYSIAEAAFNKGETAMTINGPWAWSNIDTSKVNYGVTVLPTFKGQPSKPFVGVLSAGINAASPNKELAKEFLENYLLTDEGLEAVNKDKPLGAVALKSYEEELAKDPRIAATMENAQKGEIMPNIPQMSAFWYAVRTAVINAASGRQTVDEALKDAQTRITK

SEQ ID NO: 3499 - protein, 10 aa, Artificial Sequence
  source: /note="Description of Artificial Sequence: Synthetic Tag"
EQKLISEEDL

SEQ ID NO: 3500 - protein, 6 aa, Artificial Sequence
  source: /note="Description of Artificial Sequence: Synthetic Tag"
HHHHHH

SEQ ID NO: 3501 - protein, 5 aa, Artificial Sequence
  source: /note="Description of Artificial Sequence: Synthetic Tag"
RRRRR

SEQ ID NO: 3502 - protein, 6 aa, Artificial Sequence
  source: /note="Description of Artificial Sequence: Synthetic Tag"
EEEEEE

SEQ ID NO: 3503 - protein, 38 aa, Artificial Sequence
  source: /note="Description of Artificial Sequence: Synthetic Tag"
MDEKTTGWRGGHVVEGLAGELEQLRARLEHHPQGQREP

SEQ ID NO: 3504 - protein, 12 aa, Artificial Sequence
  source: /note="Description of Artificial Sequence: Synthetic Tag"
KLGDIEFIKVNK

SEQ ID NO: 3505 - protein, 13 aa, Artificial Sequence
  source: /note="Description of Artificial Sequence: Synthetic Tag"
SLAELLNAGLGGS

SEQ ID NO: 3506 - protein, 13 aa, Artificial Sequence
  source: /note="Description of Artificial Sequence: Synthetic Tag"
AHIVMVDAYKPTK

SEQ ID NO: 3507 - protein, 15 aa, Artificial Sequence
  source: /note="Description of Artificial Sequence: Synthetic Tag"
KETAAAKFERQHMDS

SEQ ID NO: 3508 - protein, 8 aa, Artificial Sequence
  source: /note="Description of Artificial Sequence: Synthetic Tag"
WSHPQFEK

SEQ ID NO: 3509 - protein, 6 aa, Artificial Sequence
  source: /note="Description of Artificial Sequence: Synthetic Tag"
CCPGCC

SEQ ID NO: 3510 - protein, 139 aa, Artificial Sequence
  source: /note="Description of Artificial Sequence: Synthetic Tag"
MNTVCTHCQAINRIPDDRIEDAAKCGRCGHDLFDGEVINATGETLDKLLKDDLPVVIDFWAPWCGPCRNFAPIFEDVAQERSGKVRFVKVNTEAERELSSRFGIRSIPTIMIFKNGQVVDMLNGAVPKAPFDSWLNESL

SEQ ID NO: 3511 - protein, 14 aa, Artificial Sequence
  source: /note="Description of Artificial Sequence: Synthetic Tag"
GKPIPNPLLGLDST

SEQ ID NO: 3512 - DNA, 42 bp, Artificial Sequence
  source: /note="Description of Artificial Sequence: Synthetic Tag"
ggtaagcctatccctaaccctctcctcggtctcgattctacg

SEQ ID NO: 3513 - protein, 11 aa, Artificial Sequence
  source: /note="Description of Artificial Sequence: Synthetic Tag"
YTDIEMNRLGK

SEQ ID NO: 3514 - protein, 8 aa, Artificial Sequence
  source: /note="Description of Artificial Sequence: Synthetic Tag"
DLYDDDDK

SEQ ID NO: 3515 - DNA, 28 bp, Artificial Sequence
  source: /note="Description of Artificial Sequence: Synthetic Spacer"
tctagataatacgactcactagagatcc

SEQ ID NO: 3516 - DNA, 16 bp, Artificial Sequence
  source: /note="Description of Artificial Sequence: Synthetic Spacer"
tatggccacaaccatg

SEQ ID NO: 3517 - DNA, 30 bp, Artificial Sequence
  source: /note="Description of Artificial Sequence: Synthetic Spacer"
aatctagataatacgactcactagagatcc

SEQ ID NO: 3518 - DNA, 9 bp, Artificial Sequence
  source: /note="Description of Artificial Sequence: Synthetic Spacer"
tcgcgaatg

SEQ ID NO: 3519 - DNA, 6 bp, Artificial Sequence
  source: /note="Description of Artificial Sequence: Synthetic Spacer"
tcgcga

SEQ ID NO: 3520 - DNA, 32 bp, Artificial Sequence
  source: /note="Description of Artificial Sequence: Synthetic Spacer"
gcttgccacaacccacaaggagacgaccttcc

SEQ ID NO: 3521 - DNA, 11 bp, Artificial Sequence
  source: /note="Description of Artificial Sequence: Synthetic Spacer"
atcgggctagc

SEQ ID NO: 3522 - protein, 4 aa, Artificial Sequence
  source: /note="Description of Artificial Sequence: Synthetic Linker"
GGGG

SEQ ID NO: 3523 - protein, 6 aa, Artificial Sequence
  source: /note="Description of Artificial Sequence: Synthetic Linker"
GGGGGG

SEQ ID NO: 3524 - protein, 8 aa, Artificial Sequence
  source: /note="Description of Artificial Sequence: Synthetic Linker"
GGGGGGGG

SEQ ID NO: 3525 - protein, 4 aa, Artificial Sequence
  source: /note="Description of Artificial Sequence: Synthetic Linker"
GGGS

SEQ ID NO: 3526 - protein, 5 aa, Artificial Sequence
  source: /note="Description of Artificial Sequence: Synthetic Linker"
GGGGS

SEQ ID NO: 3527 - protein, 10 aa, Artificial Sequence
  source: /note="Description of Artificial Sequence: Synthetic Linker"
GGGGSGGGGS

SEQ ID NO: 3528 - protein, 15 aa, Artificial Sequence
  source: /note="Description of Artificial Sequence: Synthetic Linker"
GGGGSGGGGSGGGGS

SEQ ID NO: 3529 - DNA, 45 bp, Artificial Sequence
  source: /note="Description of Artificial Sequence: Synthetic Linker"
ggaggaggaggatccggaggaggaggatctggcggcggcggcagc

SEQ ID NO: 3530 - DNA, 45 bp, Artificial Sequence
  source: /note="Description of Artificial Sequence: Synthetic Linker"
ggaggaggaggatccggaggaggaggatctggcggaggaggcagc

SEQ ID NO: 3531 - DNA, 45 bp, Artificial Sequence
  source: /note="Description of Artificial Sequence: Synthetic Linker"
ggaggaggaggaagcggaggaggaggatccggcggaggaggctct

SEQ ID NO: 3532 - DNA, 45 bp, Artificial Sequence
  source: /note="Description of Artificial Sequence: Synthetic Linker"
ggaggaggaggcagcggaggaggaggttctggaggaggcggcagc

SEQ ID NO: 3533 - DNA, 45 bp, Artificial Sequence
  source: /note="Description of Artificial Sequence: Synthetic Linker"
ggcggcggcggctctggaggaggaggcagcggcggaggaggctcc

SEQ ID NO: 3534 - DNA, 45 bp, Artificial Sequence
  source: /note="Description of Artificial Sequence: Synthetic Linker"
ggaggaggaggcagcggcggaggaggctccggcggcggcggctct

SEQ ID NO: 3535 - protein, 20 aa, Artificial Sequence
  source: /note="Description of Artificial Sequence: Synthetic Linker"
GGGGSGGGGSGGGGSGGGGS

SEQ ID NO: 3536 - protein, 36 aa, Artificial Sequence
  source: /note="Description of Artificial Sequence: Synthetic Linker"
GGSGGGSEGGGSEGGGSEGGGSEGGGSEGGGSGGGS

SEQ ID NO: 3537 - protein, 5 aa, Artificial Sequence
  source: /note="Description of Artificial Sequence: Synthetic Linker"
SSSSG

SEQ ID NO: 3538 - protein, 10 aa, Artificial Sequence
  source: /note="Description of Artificial Sequence: Synthetic Linker"
SSSSGSSSSG

SEQ ID NO: 3539 - protein, 13 aa, Artificial Sequence
  source: /note="Description of Artificial Sequence: Synthetic Linker"
SGSSSSGSSSSGS

SEQ ID NO: 3540 - protein, 15 aa, Artificial Sequence
  source: /note="Description of Artificial Sequence: Synthetic Linker"
SSSSGSSSSGSSSSG

SEQ ID NO: 3541 - protein, 19 aa, Artificial Sequence
  source: /note="Description of Artificial Sequence: Synthetic Linker"
SVTVSSSGSSSSGSSSSGS

SEQ ID NO: 3542 - protein, 20 aa, Artificial Sequence
  source: /note="Description of Artificial Sequence: Synthetic Linker"
SSSSGSSSSGSSSSGSSSSG

SEQ ID NO: 3543 - protein, 25 aa, Artificial Sequence
  source: /note="Description of Artificial Sequence: Synthetic Linker"
SSSSGSSSSGSSSSGSSSSGSSSSG

SEQ ID NO: 3544 - protein, 6 aa, Artificial Sequence
  source: /note="Description of Artificial Sequence: Synthetic Linker"
EFSTEF

SEQ ID NO: 3545 - DNA, 18 bp, Artificial Sequence
  source: /note="Description of Artificial Sequence: Synthetic Linker"
gagttctccaccgagttc

SEQ ID NO: 3546 - DNA, 18 bp, Artificial Sequence
  source: /note="Description of Artificial Sequence: Synthetic Linker"
gagttcagcaccgagttt

SEQ ID NO: 3547 - protein, 5 aa, Artificial Sequence
  source: /note="Description of Artificial Sequence: Synthetic Linker"
GGSGG

SEQ ID NO: 3548 - DNA, 15 bp, Artificial Sequence
  source: /note="Description of Artificial Sequence: Synthetic Linker"
ggaggcagcggagga

SEQ ID NO: 3549 - DNA, 15 bp, Artificial Sequence
  source: /note="Description of Artificial Sequence: Synthetic Linker"
ggaggctctggagga

SEQ ID NO: 3550 - DNA, 15 bp, Artificial Sequence
  source: /note="Description of Artificial Sequence: Synthetic Linker"
ggaggctccggcgga

SEQ ID NO: 3551 - DNA, 15 bp, Artificial Sequence
  source: /note="Description of Artificial Sequence: Synthetic Linker"
ggaggatccggaggc

SEQ ID NO: 3552 - DNA, 15 bp, Artificial Sequence
  source: /note="Description of Artificial Sequence: Synthetic Linker"
ggaggatctggagga

SEQ ID NO: 3553 - DNA, 15 bp, Artificial Sequence
  source: /note="Description of Artificial Sequence: Synthetic Linker"
ggtggatccggagga

SEQ ID NO: 3554 - protein, 4 aa, Artificial Sequence
  source: /note="Description of Artificial Sequence: Synthetic Linker"
GGSG

SEQ ID NO: 3555 - DNA, 12 bp, Artificial Sequence
  source: /note="Description of Artificial Sequence: Synthetic Linker"
ggaggatctgga

SEQ ID NO: 3556 - DNA, 12 bp, Artificial Sequence
  source: /note="Description of Artificial Sequence: Synthetic Linker"
ggtggatccgga

SEQ ID NO: 3557 - DNA, 18 bp, Artificial Sequence
  source: /note="Description of Artificial Sequence: Synthetic Linker"
ggtggctctggtggtggt

SEQ ID NO: 3558 - DNA, 18 bp, Artificial Sequence
  source: /note="Description of Artificial Sequence: Synthetic Linker"
ggaggtagtggtggaggc

SEQ ID NO: 3559 - protein, 6 aa, Artificial Sequence
  source: /note="Description of Artificial Sequence: Synthetic Linker"
GGSGGG

SEQ ID NO: 3560 - protein, 26 aa, Artificial Sequence
  source: /note="Description of Artificial Sequence: Synthetic Linker"
SGGGSGGGGSGGGGSGGGGSGGGSLQ

SEQ ID NO: 3561 - DNA, 78 bp, Artificial Sequence
  source: /note="Description of Artificial Sequence: Synthetic Linker"
tcaggtggcggtagtggtgggggaggatctggaggcggaggaagcgggggtggaggttcaggaggagggagcttgcaa

SEQ ID NO: 3562 - DNA, 78 bp, Artificial Sequence
  source: /note="Description of Artificial Sequence: Synthetic Linker"
tcaggtggcggtagtggtgggggaggatctggaggcggaggaagcgggggtggaggttcaggtggaggcagcttgcaa

SEQ ID NO: 3563 - DNA, 78 bp, Artificial Sequence
  source: /note="Description of Artificial Sequence: Synthetic Linker"
tccggtggaggtagcggtggagggggttctggtggaggaggttctggaggtggaggttctggcggtgggtccttgcaa

SEQ ID NO: 3564 - DNA, 78 bp, Artificial Sequence
  source: /note="Description of Artificial Sequence: Synthetic Linker"
tctggcggaggaagcggaggcggaggatctggtggtggtggatctggcggcggtggtagtggcggaggttctctgcaa

SEQ ID NO: 3565 - DNA, 78 bp, Artificial Sequence
  source: /note="Description of Artificial Sequence: Synthetic Linker"
tccggggggggtagcgggggagggggttccggcgggggagggtctggagggggaggttccggcggggggtccttgcaa

SEQ ID NO: 3566 - DNA, 78 bp, Artificial Sequence
  source: /note="Description of Artificial Sequence: Synthetic Linker"
tctggcggaggatctggaggaggcggatctggaggaggaggcagtggaggcggaggatctggcggaggatctctgcag

SEQ ID NO: 3567 - protein, 5 aa, Artificial Sequence
  source: /note="Description of Artificial Sequence: Synthetic Linker"
SGGGS

SEQ ID NO: 3568 - DNA, 15 bp, Artificial Sequence
  source: /note="Description of Artificial Sequence: Synthetic Linker"
tcaggtggcggtagt

SEQ ID NO: 3569 - DNA, 15 bp, Artificial Sequence
  source: /note="Description of Artificial Sequence: Synthetic Linker"
agcggcggtggcagc

SEQ ID NO: 3570 - DNA, 15 bp, Artificial Sequence
  source: /note="Description of Artificial Sequence: Synthetic Linker"
tcaggcggggggagt

SEQ ID NO: 3571 - protein, 20 aa, Artificial Sequence
  source: /note="Description of Artificial Sequence: Synthetic Linker"
SGGGSGGGGSGGGGSGGGGS

SEQ ID NO: 3572 - DNA, 60 bp, Artificial Sequence
  source: /note="Description of Artificial Sequence: Synthetic Linker"
agtggtggcgggtccggcggtggtggtagcgggggtggaggctcaggtggcggtggcagt

SEQ ID NO: 3573 - protein, 9 aa, Artificial Sequence
  source: /note="Description of Artificial Sequence: Synthetic Linker"
GGSGGGSGG

SEQ ID NO: 3574 - DNA, 27 bp, Artificial Sequence
  source: /note="Description of Artificial Sequence: Synthetic Linker"
ggaggtagtggtggaggcagtggtgga

SEQ ID NO: 3575 - protein, 5 aa, Artificial Sequence
  source: /note="Description of Artificial Sequence: Synthetic Linker"
GGGGG

SEQ ID NO: 3576 - protein, 25 aa, Artificial Sequence
  source: /note="Description of Artificial Sequence: Synthetic Linker"
GGGGSGGGGSGGGGSGGGGSGGGGS

SEQ ID NO: 3577 - protein, 30 aa, Artificial Sequence
  source: /note="Description of Artificial Sequence: Synthetic Linker"
GGGGSGGGGSGGGGSGGGGSGGGGSGGGGS

SEQ ID NO: 3578 - protein, 10 aa, Artificial Sequence
  source: /note="Description of Artificial Sequence: Synthetic Linker"
SSSSGSSSSG

SEQ ID NO: 3579 - protein, 30 aa, Artificial Sequence
  source: /note="Description of Artificial Sequence: Synthetic Linker"
SSSSGSSSSGSSSSGSSSSGSSSSGSSSSG

SEQ ID NO: 3580 - protein, 34 aa, Artificial Sequence
  source: /note="Description of Artificial Sequence: Synthetic Linker"
SGGGSGGGGSGGGGSGGGGSGGGGSGGGGSGGGS

SEQ ID NO: 3581 - DNA, 102 bp, Artificial Sequence
  source: /note="Description of Artificial Sequence: Synthetic Linker"
tctggtggcgggagtggaggaggtgggtccggagggggagggagcggtggtggaggttccggcggggggggtagtggaggcggagggtcaggtgggggcagc

SEQ ID NO: 3582 - protein, 36 aa, Artificial Sequence
  source: /note="Description of Artificial Sequence: Synthetic Linker"
GGSAGGSGSGSSGGSSGASGTGTAGGTGSGSGTGSG

SEQ ID NO: 3583 - protein, 5 aa, Artificial Sequence
  source: /note="Description of Artificial Sequence: Synthetic Linker"
PAPAP

SEQ ID NO: 3584 - protein, 10 aa, Artificial Sequence
  source: /note="Description of Artificial Sequence: Synthetic Linker"
APAPAPAPAP

SEQ ID NO: 3585 - protein, 12 aa, Artificial Sequence
  source: /note="Description of Artificial Sequence: Synthetic Linker"
APAPAPAPAPAP

SEQ ID NO: 3586 - protein, 14 aa, Artificial Sequence
  source: /note="Description of Artificial Sequence: Synthetic Linker"
APAPAPAPAPAPAP

SEQ ID NO: 3587 - protein, 16 aa, Artificial Sequence
  source: /note="Description of Artificial Sequence: Synthetic Linker"
APAPAPAPAPAPAPAP

SEQ ID NO: 3588 - protein, 18 aa, Artificial Sequence
  source: /note="Description of Artificial Sequence: Synthetic Linker"
APAPAPAPAPAPAPAPAP

SEQ ID NO: 3589 - protein, 20 aa, Artificial Sequence
  source: /note="Description of Artificial Sequence: Synthetic Linker"
APAPAPAPAPAPAPAPAPAP

SEQ ID NO: 3590 - protein, 22 aa, Artificial Sequence
  source: /note="Description of Artificial Sequence: Synthetic Linker"
APAPAPAPAPAPAPAPAPAPAP

SEQ ID NO: 3591 - protein, 24 aa, Artificial Sequence
  source: /note="Description of Artificial Sequence: Synthetic Linker"
APAPAPAPAPAPAPAPAPAPAPAP

SEQ ID NO: 3592 - protein, 26 aa, Artificial Sequence
  source: /note="Description of Artificial Sequence: Synthetic Linker"
APAPAPAPAPAPAPAPAPAPAPAPAP

SEQ ID NO: 3593 - protein, 28 aa, Artificial Sequence
  source: /note="Description of Artificial Sequence: Synthetic Linker"
APAPAPAPAPAPAPAPAPAPAPAPAPAP

SEQ ID NO: 3594 - protein, 30 aa, Artificial Sequence
  source: /note="Description of Artificial Sequence: Synthetic Linker"
APAPAPAPAPAPAPAPAPAPAPAPAPAPAP

SEQ ID NO: 3595 - protein, 32 aa, Artificial Sequence
  source: /note="Description of Artificial Sequence: Synthetic Linker"
APAPAPAPAPAPAPAPAPAPAPAPAPAPAPAP

SEQ ID NO: 3596 - protein, 33 aa, Artificial Sequence
  source: /note="Description of Artificial Sequence: Synthetic Linker"
EPEPEPEPIPEPPKEAPVVIEKPKPKPKPKPKP

SEQ ID NO: 3597 - protein, 34 aa, Artificial Sequence
  source: /note="Description of Artificial Sequence: Synthetic Linker"
APAPAPAPAPAPAPAPAPAPAPAPAPAPAPAPAP

SEQ ID NO: 3598 - protein, 5 aa, Artificial Sequence
  source: /note="Description of Artificial Sequence: Synthetic Linker"
EAAAK

SEQ ID NO: 3599 - protein, 10 aa, Artificial Sequence
  source: /note="Description of Artificial Sequence: Synthetic Linker"
EAAAKEAAAK

SEQ ID NO: 3600 - protein, 12 aa, Artificial Sequence
  source: /note="Description of Artificial Sequence: Synthetic Linker"
AEAAAKEAAAKA

SEQ ID NO: 3601 - protein, 15 aa, Artificial Sequence
  source: /note="Description of Artificial Sequence: Synthetic Linker"
EAAAKEAAAKEAAAK

SEQ ID NO: 3602 - protein, 17 aa, Artificial Sequence
  source: /note="Description of Artificial Sequence: Synthetic Linker"
AEAAAKEAAAKEAAAKA

SEQ ID NO: 3603 - protein, 22 aa, Artificial Sequence
  source: /note="Description of Artificial Sequence: Synthetic Linker"
AEAAAKEAAAKEAAAKEAAAKA

SEQ ID NO: 3604 - protein, 27 aa, Artificial Sequence
  source: /note="Description of Artificial Sequence: Synthetic Linker"
AEAAAKEAAAKEAAAKEAAAKEAAAKA

SEQ ID NO: 3605 - protein, 46 aa, Artificial Sequence
  source: /note="Description of Artificial Sequence: Synthetic Linker"
AEAAAKEAAAKEAAAKEAAAKALEAEAAAKEAAAKEAAAKEAAAKA

SEQ ID NO: 3606 - protein, 12 aa, Artificial Sequence
  source: /note="Description of Artificial Sequence: Synthetic Linker"
GKSSGSGSESKS

SEQ ID NO: 3607 - protein, 15 aa, Artificial Sequence
  source: /note="Description of Artificial Sequence: Synthetic Linker"
GGSTSGSGKSSEGKG

SEQ ID NO: 3608 - protein, 19 aa, Artificial Sequence
  source: /note="Description of Artificial Sequence: Synthetic Linker"
GSTSGSGKSSSEGSGSTKG

SEQ ID NO: 3609 - protein, 13 aa, Artificial Sequence
  source: /note="Description of Artificial Sequence: Synthetic Linker"
VDYPYDVPDYALD

SEQ ID NO: 3610 - DNA, 39 bp, Artificial Sequence
  source: /note="Description of Artificial Sequence: Synthetic Linker"
gtcgactatccctacgatgttccggactacgcactggac

SEQ ID NO: 3611 - protein, 14 aa, Artificial Sequence
  source: /note="Description of Artificial Sequence: Synthetic Linker"
EGKSSGSGSESKEF

SEQ ID NO: 3612 - protein, 35 aa, Artificial Sequence
  source: /note="Description of Artificial Sequence: Synthetic Linker"
SGGGSGGGGSGGGGSGGGGSGGGSLQYPYDVPDYA

SEQ ID NO: 3613 - DNA, 105 bp, Artificial Sequence
  source: /note="Description of Artificial Sequence: Synthetic Linker"
tcaggtggcggtagtggtgggggaggatctggaggcggaggaagcgggggtggaggttcaggtggaggcagcttgcaatacccatacgatgttccagattacgct

SEQ ID NO: 3614 - protein, 8 aa, Artificial Sequence
  source: /note="Description of Artificial Sequence: Synthetic Linker"
DYKDDDDK

SEQ ID NO: 3615 - DNA, 24 bp, Artificial Sequence
  source: /note="Description of Artificial Sequence: Synthetic Linker"
gactacaaagacgatgacgacaag

SEQ ID NO: 3616 - protein, 34 aa, Artificial Sequence
  source: /note="Description of Artificial Sequence: Synthetic Linker"
SGGGSGGGGSGGGGSGGGGSYPYDVPDYASGGGS

SEQ ID NO: 3617 - DNA, 102 bp, Artificial Sequence
  source: /note="Description of Artificial Sequence: Synthetic Linker"
agtggtggcgggtccggcggtggtggtagcgggggtggaggctcaggtggcggtggcagttatccttacgatgtgcccgactatgcttcaggcggggggagt

SEQ ID NO: 3618 - protein, 22 aa, Artificial Sequence
  source: /note="Description of Artificial Sequence: Synthetic Linker"
GSGATNFSLLKQAGDVEENPGP

SEQ ID NO: 3619 - DNA, 66 bp, Artificial Sequence
  source: /note="Description of Artificial Sequence: Synthetic Linker"
ggttcaggagctactaacttcagcctgctgaagcaggctggagacgtggaggagaaccctggacct

SEQ ID NO: 3620 - protein, 8 aa, Artificial Sequence
  source: /note="Description of Artificial Sequence: Synthetic Linker"
  MOD_RES (4)..(4): Any amino acid
DVEXNPGP

SEQ ID NO: 3621 - protein, 8 aa, Artificial Sequence
  source: /note="Description of Artificial Sequence: Synthetic Linker"
  MOD_RES (4)..(4): Any amino acid
DIEXNPGP

SEQ ID NO: 3622 - protein, 22 aa, Artificial Sequence
  source: /note="Description of Artificial Sequence: Synthetic Linker"
SGGGGSGGGGSGGGGSGGGSLQ

SEQ ID NO: 3623 - protein, 13 aa, Artificial Sequence
  source: /note="Description of Artificial Sequence: Synthetic Linker"
QLIGMLQGLMRDL

SEQ ID NO: 3624 - DNA, 39 bp, Artificial Sequence
  source: /note="Description of Artificial Sequence: Synthetic Linker"
cagctgatagggatgctacaaggcctgatgcgtgacctg

SEQ ID NO: 3625 - protein, 4 aa, Artificial Sequence
  source: /note="Description of Artificial Sequence: Synthetic Linker"
ASFE

SEQ ID NO: 3626 - DNA, 12 bp, Artificial Sequence
  source: /note="Description of Artificial Sequence: Synthetic Linker"
gctagcttcgaa

SEQ ID NO: 3627 - protein, 6 aa, Artificial Sequence
  source: /note="Description of Artificial Sequence: Synthetic Linker"
ATKASK

SEQ ID NO: 3628 - protein, 7 aa, Artificial Sequence
  source: /note="Description of Artificial Sequence: Synthetic Linker"
ATKGATK

SEQ ID NO: 3629 - protein, 7 aa, Artificial Sequence
  source: /note="Description of Artificial Sequence: Synthetic Linker"
IAKAFKN

SEQ ID NO: 3630 - protein, 14 aa, Artificial Sequence
  source: /note="Description of Artificial Sequence: Synthetic Linker"
VRGSPAINVAVHVF

SEQ ID NO: 3631 - protein, 18 aa, Artificial Sequence
  source: /note="Description of Artificial Sequence: Synthetic Linker"
GSTSGSGKPGSGEGSTKG

SEQ ID NO: 3632 - protein, 18 aa, Artificial Sequence
  source: /note="Description of Artificial Sequence: Synthetic Linker"
KESGSVSSEQLAQFRSLD

SEQ ID NO: 3633 - protein, 4 aa, Artificial Sequence
  source: /note="Description of Artificial Sequence: Synthetic Linker"
GFLG

SEQ ID NO: 3634 - protein, 6 aa, Artificial Sequence
  source: /note="Description of Artificial Sequence: Synthetic Linker"
PLGLWA

SEQ ID NO: 3635 - protein, 6 aa, Artificial Sequence
  source: /note="Description of Artificial Sequence: Synthetic Linker"
RVLAEA

SEQ ID NO: 3636 - protein, 8 aa, Artificial Sequence
  source: /note="Description of Artificial Sequence: Synthetic Linker"
GGIEGRGS

SEQ ID NO: 3637 - protein, 9 aa, Artificial Sequence
  source: /note="Description of Artificial Sequence: Synthetic Linker"
RRRRRRRRR

SEQ ID NO: 3638 - protein, 10 aa, Artificial Sequence
  source: /note="Description of Artificial Sequence: Synthetic Linker"
EDVVCCSMSY

SEQ ID NO: 3639 - protein, 10 aa, Artificial Sequence
  source: /note="Description of Artificial Sequence: Synthetic Linker"
TRHRQPRGWE

SEQ ID NO: 3640 - protein, 10 aa, Artificial Sequence
  source: /note="Description of Artificial Sequence: Synthetic Linker"
AGNRVRRSVG

SEQ ID NO: 3641 - protein, 12 aa, Artificial Sequence
  source: /note="Description of Artificial Sequence: Synthetic Linker"
CRRRRRREAEAC

SEQ ID NO: 3642 - protein, 17 aa, Artificial Sequence
  source: /note="Description of Artificial Sequence: Synthetic Linker"
VSQTSKLTRAETVFPDV

SEQ ID NO: 3643 - protein, 20 aa, Artificial Sequence
  source: /note="Description of Artificial Sequence: Synthetic Linker"
LEAGCKNFFPRSFTSCGSLE

SEQ ID NO: 3644 - protein, 12 aa, Artificial Sequence
  source: /note="Description of Artificial Sequence: Synthetic Linker"
GSAGSAAGSGEF

SEQ ID NO: 3645 - protein, 14 aa, Artificial Sequence
  source: /note="Description of Artificial Sequence: Synthetic Linker"
EGKSSGSGSESKST

SEQ ID NO: 3646 - protein, 20 aa, Artificial Sequence
  source: /note="Description of Artificial Sequence: Synthetic Linker"
NSGAGSGGSSGSDGASGSRD

SEQ ID NO: 3647 - protein, 8 aa, Artificial Sequence
  source: /note="Description of Artificial Sequence: Synthetic Linker"
LWSLDTTP

SEQ ID NO: 3648 - protein, 4 aa, Artificial Sequence
  source: /note="Description of Artificial Sequence: Synthetic Linker"
MDGA

SEQ ID NO: 3649 - protein, 4 aa, Artificial Sequence
  source: /note="Description of Artificial Sequence: Synthetic Linker"
QGNY

SEQ ID NO: 3650 - protein, 4 aa, Artificial Sequence
  source: /note="Description of Artificial Sequence: Synthetic Linker"
RDGK

SEQ ID NO: 3651 - protein, 5 aa, Artificial Sequence
  source: /note="Description of Artificial Sequence: Synthetic Linker"
DLNVG

SEQ ID NO: 3652 - protein, 5 aa, Artificial Sequence
  source: /note="Description of Artificial Sequence: Synthetic Linker"
MATDE

SEQ ID NO: 3653 - protein, 6 aa, Artificial Sequence
  source: /note="Description of Artificial Sequence: Synthetic Linker"
LTGSGA

SEQ ID NO: 3654 - protein, 7 aa, Artificial Sequence
  source: /note="Description of Artificial Sequence: Synthetic Linker"
FAASGEL

SEQ ID NO: 3655 - protein, 7 aa, Artificial Sequence
  source: /note="Description of Artificial Sequence: Synthetic Linker"
FNNREEQ

SEQ ID NO: 3656 - protein, 7 aa, Artificial Sequence
  source: /note="Description of Artificial Sequence: Synthetic Linker"
GYMARNE

SEQ ID NO: 3657 - protein, 7 aa, Artificial Sequence
  source: /note="Description of Artificial Sequence: Synthetic Linker"
VGTEHAK

SEQ ID NO: 3658 - protein, 5 aa, Artificial Sequence
  source: /note="Description of Artificial Sequence: Synthetic Linker"
LNLDY

SEQ ID NO: 3659 - protein, 14 aa, Artificial Sequence
  source: /note="Description of Artificial Sequence: Synthetic Linker"
KDGVIKGYYAYINP

SEQ ID NO: 3660 - protein, 4 aa, Artificial Sequence
  source: /note="Description of Artificial Sequence: Synthetic Linker"
SKAQ

SEQ ID NO: 3661 - protein, 6 aa, Artificial Sequence
  source: /note="Description of Artificial Sequence: Synthetic Linker"
LFNASA

SEQ ID NO: 3662 - protein, 6 aa, Artificial Sequence
  source: /note="Description of Artificial Sequence: Synthetic Linker"
YQDGSV

SEQ ID NO: 3663 - protein, 7 aa, Artificial Sequence
  source: /note="Description of Artificial Sequence: Synthetic Linker"
IHPQSVI

SEQ ID NO: 3664 - protein, 5 aa, Artificial Sequence
  source: /note="Description of Artificial Sequence: Synthetic Linker"
KNPMD

SEQ ID NO: 3665 - protein, 7 aa, Artificial Sequence
  source: /note="Description of Artificial Sequence: Synthetic Linker"
LGSEVPL

SEQ ID NO: 3666 - protein, 14 aa, Artificial Sequence
  source: /note="Description of Artificial Sequence: Synthetic Linker"
LNVNNKVPNGATSM

SEQ ID NO: 3667 - protein, 5 aa, Artificial Sequence
  source: /note="Description of Artificial Sequence: Synthetic Linker"
TTDDL

SEQ ID NO: 3668 - protein, 6 aa, Artificial Sequence
  source: /note="Description of Artificial Sequence: Synthetic Linker"
AAGIRA

SEQ ID NO: 3669 - protein, 6 aa, Artificial Sequence
  source: /note="Description of Artificial Sequence: Synthetic Linker"
QAGVDC

SEQ ID NO: 3670 - protein, 6 aa, Artificial Sequence
  source: /note="Description of Artificial Sequence: Synthetic Linker"
YNPTDI

SEQ ID NO: 3671 - protein, 8 aa, Artificial Sequence
  source: /note="Description of Artificial Sequence: Synthetic Linker"
EFLPRDTG

SEQ ID NO: 3672 - protein, 9 aa, Artificial Sequence
  source: /note="Description of Artificial Sequence: Synthetic Linker"
GSGLPEQTD

SEQ ID NO: 3673 - protein, 5 aa, Artificial Sequence
  source: /note="Description of Artificial Sequence: Synthetic Linker"
YSSNV

SEQ ID NO: 3674 - protein, 6 aa, Artificial Sequence
  source: /note="Description of Artificial Sequence: Synthetic Linker"
KAGLNP

SEQ ID NO: 3675 - protein, 6 aa, Artificial Sequence
  source: /note="Description of Artificial Sequence: Synthetic Linker"
KEEGKF

SEQ ID NO: 3676 - protein, 6 aa, Artificial Sequence
  source: /note="Description of Artificial Sequence: Synthetic Linker"
VRGGIW

SEQ ID NO: 3677 - protein, 9 aa, Artificial Sequence
  source: /note="Description of Artificial Sequence: Synthetic Linker"
QRYLKPENK

SEQ ID NO: 3678 - protein, 6 aa, Artificial Sequence
  source: /note="Description of Artificial Sequence: Synthetic Linker"
EGVGEI

SEQ ID NO: 3679 - protein, 8 aa, Artificial Sequence
  source: /note="Description of Artificial Sequence: Synthetic Linker"
PVDPPEKW

SEQ ID NO: 3680 - protein, 9 aa, Artificial Sequence
  source: /note="Description of Artificial Sequence: Synthetic Linker"
AHPGVSIPT

SEQ ID NO: 3681 - protein, 15 aa, Artificial Sequence
  source: /note="Description of Artificial Sequence: Synthetic Linker"
FKDPELPRNTPKRSI

SEQ ID NO: 3682 - protein, 14 aa, Artificial Sequence
  source: /note="Description of Artificial Sequence: Synthetic Linker"
YLEGVERNPVGAGL

SEQ ID NO: 3683 - protein, 5 aa, Artificial Sequence
  source: /note="Description of Artificial Sequence: Synthetic Linker"
CPRCP

SEQ ID NO: 3684 - protein, 7 aa, Artificial Sequence
  source: /note="Description of Artificial Sequence: Synthetic Linker"
APPVAGP

SEQ ID NO: 3685 - protein, 8 aa, Artificial Sequence
  source: /note="Description of Artificial Sequence: Synthetic Linker"
APELLGGP

SEQ ID NO: 3686 - protein, 9 aa, Artificial Sequence
  source: /note="Description of Artificial Sequence: Synthetic Linker"
CCVECPPCP

SEQ ID NO: 3687 - protein, 12 aa, Artificial Sequence
  source: /note="Description of Artificial Sequence: Synthetic Linker"
ELKTPLGDTTHT

SEQ ID NO: 3688 - protein, 6 aa, Artificial Sequence
  source: /note="Description of Artificial Sequence: Synthetic Linker"
HNVDDV

SEQ ID NO: 3689 - protein, 6 aa, Artificial Sequence
  source: /note="Description of Artificial Sequence: Synthetic Linker"
AGQKDE

SEQ ID NO: 3690 - protein, 9 aa, Artificial Sequence
  source: /note="Description of Artificial Sequence: Synthetic Linker"
KLNLPILPT

SEQ ID NO: 3691 - protein, 9 aa, Artificial Sequence
  source: /note="Description of Artificial Sequence: Synthetic Linker"
SSPRVTNEG

SEQ ID NO: 3692 - protein, 17 aa, Artificial Sequence
  source: /note="Description of Artificial Sequence: Synthetic Linker"
KAAAALKGSDHRRATNV

SEQ ID NO: 3693 - protein, 4 aa, Artificial Sequence
  source: /note="Description of Artificial Sequence: Synthetic Linker"
KKRV

SEQ ID NO: 3694 - protein, 5 aa, Artificial Sequence
  source: /note="Description of Artificial Sequence: Synthetic Linker"
QLEVK

SEQ ID NO: 3695 - protein, 5 aa, Artificial Sequence
  source: /note="Description of Artificial Sequence: Synthetic Linker"
TNGRL

SEQ ID NO: 3696 - protein, 10 aa, Artificial Sequence
  source: /note="Description of Artificial Sequence: Synthetic Linker"
LYTPEIAENQ

SEQ ID NO: 3697 - protein, 4 aa, Artificial Sequence
  source: /note="Description of Artificial Sequence: Synthetic Linker"
NSEY

SEQ ID NO: 3698 - protein, 5 aa, Artificial Sequence
  source: /note="Description of Artificial Sequence: Synthetic Linker"
SMKDF

SEQ ID NO: 3699 - protein, 12 aa, Artificial Sequence
  source: /note="Description of Artificial Sequence: Synthetic Linker"
KDRWQERHILRP

SEQ ID NO: 3700 - protein, 14 aa, Artificial Sequence
  source: /note="Description of Artificial Sequence: Synthetic Linker"
DDPEGPVMPGSHSV

SEQ ID NO: 3701 - protein, 23 aa, Artificial Sequence
  source: /note="Description of Artificial Sequence: Synthetic Linker"
LCPSNPTCIYKYGDESSNSLPGH

SEQ ID NO: 3702 - protein, 35 aa, Artificial Sequence
  source: /note="Description of Artificial Sequence: Synthetic Linker"
LCEALQHNLPPFTPPPHTEDSVYPMPRVIFRMFDY

SEQ ID NO: 3703 - protein, 5 aa, Artificial Sequence
  source: /note="Description of Artificial Sequence: Synthetic Linker"
NMVTC

SEQ ID NO: 3704 - protein, 10 aa, Artificial Sequence
  source: /note="Description of Artificial Sequence: Synthetic Linker"
NLEEHLGKLN

SEQ ID NO: 3705 - protein, 4 aa, Artificial Sequence
  source: /note="Description of Artificial Sequence: Synthetic Linker"
QGAH

SEQ ID NO: 3706 - protein, 6 aa, Artificial Sequence
  source: /note="Description of Artificial Sequence: Synthetic Linker"
QRIPLY

SEQ ID NO: 3707 - protein, 8 aa, Artificial Sequence
  source: /note="Description of Artificial Sequence: Synthetic Linker"
QRKPLFYI

SEQ ID NO: 3708 - protein, 4 aa, Artificial Sequence
  source: /note="Description of Artificial Sequence: Synthetic Linker"
AGGR

SEQ ID NO: 3709 - protein, 6 aa, Artificial Sequence
  source: /note="Description of Artificial Sequence: Synthetic Linker"
YPYKGE

SEQ ID NO: 3710 - protein, 7 aa, Artificial Sequence
  source: /note="Description of Artificial Sequence: Synthetic Linker"
NHETGEL

SEQ ID NO: 3711 - protein, 8 aa, Artificial Sequence
  source: /note="Description of Artificial Sequence: Synthetic Linker"
TFELKTDV

SEQ ID NO: 3712 - protein, 25 aa, Artificial Sequence
  source: /note="Description of Artificial Sequence: Synthetic Linker"
ALGLPHSDVFRQAKDVAESDRGFSL

SEQ ID NO: 3713 - protein, 4 aa, Artificial Sequence
  source: /note="Description of Artificial Sequence: Synthetic Linker"
LKDW

SEQ ID NO: 3714 - protein, 4 aa, Artificial Sequence
  source: /note="Description of Artificial Sequence: Synthetic Linker"
WTGM

SEQ ID NO: 3715 - protein, 4 aa, Artificial Sequence
  source: /note="Description of Artificial Sequence: Synthetic Linker"
YNGL

SEQ ID NO: 3716 - protein, 5 aa, Artificial Sequence
  source: /note="Description of Artificial Sequence: Synthetic Linker"
DRPGE

SEQ ID NO: 3717 - protein, 5 aa, Artificial Sequence
  source: /note="Description of Artificial Sequence: Synthetic Linker"
LGVSI

SEQ ID NO: 3718 - protein, 5 aa, Artificial Sequence
  source: /note="Description of Artificial Sequence: Synthetic Linker"
RSTGR

SEQ ID NO: 3719 - protein, 5 aa, Artificial Sequence
  source: /note="Description of Artificial Sequence: Synthetic Linker"
YRMLP

SEQ ID NO: 3720 - protein, 5 aa, Artificial Sequence
  source: /note="Description of Artificial Sequence: Synthetic Linker"
YVNDF

SEQ ID NO: 3721 - protein, 6 aa, Artificial Sequence
  source: /note="Description of Artificial Sequence: Synthetic Linker"
EYGSPR

SEQ ID NO: 3722 - protein, 6 aa, Artificial Sequence
  source: /note="Description of Artificial Sequence: Synthetic Linker"
IDRGRV

SEQ ID NO: 3723 - protein, 7 aa, Artificial Sequence
  source: /note="Description of Artificial Sequence: Synthetic Linker"
RAADGQM

SEQ ID NO: 3724 - protein, 7 aa, Artificial Sequence
  source: /note="Description of Artificial Sequence: Synthetic Linker"
TKEKNNV

SEQ ID NO: 3725 - protein, 8 aa, Artificial Sequence
  source: /note="Description of Artificial Sequence: Synthetic Linker"
DQAGLGHE

SEQ ID NO: 3726 - protein, 8 aa, Artificial Sequence
  source: /note="Description of Artificial Sequence: Synthetic Linker"
FSQIKDAM

SEQ ID NO: 3727 - protein, 8 aa, Artificial Sequence
  source: /note="Description of Artificial Sequence: Synthetic Linker"
QAAPGKST

SEQ ID NO: 3728 - protein, 8 aa, Artificial Sequence
  source: /note="Description of Artificial Sequence: Synthetic Linker"
QLPAGATQ

SEQ ID NO: 3729 - protein, 9 aa, Artificial Sequence
  source: /note="Description of Artificial Sequence: Synthetic Linker"
AAKHPDMLT

SEQ ID NO: 3730 - protein, 9 aa, Artificial Sequence
  source: /note="Description of Artificial Sequence: Synthetic Linker"
LASKLPTGV

SEQ ID NO: 3731 - protein, 9 aa, Artificial Sequence
  source: /note="Description of Artificial Sequence: Synthetic Linker"
PNGLEDTPQ

SEQ ID NO: 3732 - protein, 9 aa, Artificial Sequence
  source: /note="Description of Artificial Sequence: Synthetic Linker"
QERLSGNQA

SEQ ID NO: 3733 - protein, 12 aa, Artificial Sequence
  source: /note="Description of Artificial Sequence: Synthetic Linker"
NGFGFAGRGQNT

SEQ ID NO: 3734 - protein, 14 aa, Artificial Sequence
  source: /note="Description of Artificial Sequence: Synthetic Linker"
RLPSSFLPDEDQGV

SEQ ID NO: 3735 - protein, 15 aa, Artificial Sequence
  source: /note="Description of Artificial Sequence: Synthetic Linker"
FNLPAIVELGTATGF

SEQ ID NO: 3736 - protein, 17 aa, Artificial Sequence
  source: /note="Description of Artificial Sequence: Synthetic Linker"
MLKPIAKGDHGEGKKGF

SEQ ID NO: 3737 - protein, 7 aa, Artificial Sequence
  source: /note="Description of Artificial Sequence: Synthetic Linker"
LAHLLPP

SEQ ID NO: 3738 - protein, 9 aa, Artificial Sequence
  source: /note="Description of Artificial Sequence: Synthetic Linker"
QAPEAGFEH

SEQ ID NO: 3739 - protein, 10 aa, Artificial Sequence
  source: /note="Description of Artificial Sequence: Synthetic Linker"
KDKFICDRPL

SEQ ID NO: 3740 - protein, 16 aa, Artificial Sequence
  source: /note="Description of Artificial Sequence: Synthetic Linker"
PVEFHNPLKGHVAEPH

SEQ ID NO: 3741 - protein, 16 aa, Artificial Sequence
  source: /note="Description of Artificial Sequence: Synthetic Linker"
QKTMPSAPAPDGLPSE

SEQ ID NO: 3742 - protein, 4 aa, Artificial Sequence
  source: /note="Description of Artificial Sequence: Synthetic Linker"
AGRV

SEQ ID NO: 3743 - protein, 6 aa, Artificial Sequence
  source: /note="Description of Artificial Sequence: Synthetic Linker"
AGHGFA

SEQ ID NO: 3744 - protein, 10 aa, Artificial Sequence
  source: /note="Description of Artificial Sequence: Synthetic Linker"
LPPGPGPFPG

SEQ ID NO: 3745 - protein, 11 aa, Artificial Sequence
  source: /note="Description of Artificial Sequence: Synthetic Linker"
IFGIGGGLLEY

SEQ ID NO: 3746 - protein, 15 aa, Artificial Sequence
  source: /note="Description of Artificial Sequence: Synthetic Linker"
AYYNFEDLPNNMDNI

SEQ ID NO: 3747 - protein, 10 aa, Artificial Sequence
  source: /note="Description of Artificial Sequence: Synthetic Linker"
MICTRSKPKC

SEQ ID NO: 3748 - protein, 6 aa, Artificial Sequence
  source: /note="Description of Artificial Sequence: Synthetic Linker"
QSSLDL

SEQ ID NO: 3749 - protein, 6 aa, Artificial Sequence
  source: /note="Description of Artificial Sequence: Synthetic Linker"
IPDGDE

SEQ ID NO: 3750 - protein, 15 aa, Artificial Sequence
  source: /note="Description of Artificial Sequence: Synthetic Linker"
PTNPVTGEIPTLSAL

SEQ ID NO: 3751 - protein, 9 aa, Artificial Sequence
  source: /note="Description of Artificial Sequence: Synthetic Linker"
GGPCRADIK

SEQ ID NO: 3752 - protein, 11 aa, Artificial Sequence
  source: /note="Description of Artificial Sequence: Synthetic Linker"
SGACSTDKPCG

SEQ ID NO: 3753 - protein, 11 aa, Artificial Sequence
  source: /note="Description of Artificial Sequence: Synthetic Linker"
EGSKTVPIADK

SEQ ID NO: 3754 - protein, 7 aa, Artificial Sequence
  source: /note="Description of Artificial Sequence: Synthetic Linker"
INGKKPE

SEQ ID NO: 3755 - protein, 8 aa, Artificial Sequence
  source: /note="Description of Artificial Sequence: Synthetic Linker"
ELPAYMSG

SEQ ID NO: 3756 - protein, 8 aa, Artificial Sequence
  source: /note="Description of Artificial Sequence: Synthetic Linker"
VTGTLDYG

SEQ ID NO: 3757 - protein, 15 aa, Artificial Sequence
  source: /note="Description of Artificial Sequence: Synthetic Linker"
AAEDAIEIHPGTPNV

SEQ ID NO: 3758 - protein, 21 aa, Artificial Sequence
  source: /note="Description of Artificial Sequence: Synthetic Linker"
LEFKMPADGRIWGSKYPRPTA

SEQ ID NO: 3759 - protein, 5 aa, Artificial Sequence
  source: /note="Description of Artificial Sequence: Synthetic Linker"
SDYDV

SEQ ID NO: 3760 - protein, 5 aa, Artificial Sequence
  source: /note="Description of Artificial Sequence: Synthetic Linker"
VGSGP

SEQ ID NO: 3761 - protein, 6 aa, Artificial Sequence
  source: /note="Description of Artificial Sequence: Synthetic Linker"
IDSQSA

SEQ ID NO: 3762 - protein, 6 aa, Artificial Sequence
  source: /note="Description of Artificial Sequence: Synthetic Linker"
NKRDAY

SEQ ID NO: 3763 - protein, 6 aa, Artificial Sequence
  source: /note="Description of Artificial Sequence: Synthetic Linker"
RKGIRT

SEQ ID NO: 3764 - protein, 7 aa, Artificial Sequence
  source: /note="Description of Artificial Sequence: Synthetic Linker"
MGERFGG

SEQ ID NO: 3765 - protein, 8 aa, Artificial Sequence
  source: /note="Description of Artificial Sequence: Synthetic Linker"
VDTGAEKR

SEQ ID NO: 3766 - protein, 10 aa, Artificial Sequence
  source: /note="Description of Artificial Sequence: Synthetic Linker"
TGGHPSKEAQ

SEQ ID NO: 3767 - protein, 10 aa, Artificial Sequence
  source: /note="Description of Artificial Sequence: Synthetic Linker"
VPAATEGGLH

SEQ ID NO: 3768 - protein, 18 aa, Artificial Sequence
  source: /note="Description of Artificial Sequence: Synthetic Linker"
VLDTVDIENYISVPKTEG

SEQ ID NO: 3769 - protein, 5 aa, Artificial Sequence
  source: /note="Description of Artificial Sequence: Synthetic Linker"
DLAYV

SEQ ID NO: 3770 - protein, 13 aa, Artificial Sequence
  source: /note="Description of Artificial Sequence: Synthetic Linker"
VVPPELKTKDHII

SEQ ID NO: 3771 - protein, 5 aa, Artificial Sequence
  source: /note="Description of Artificial Sequence: Synthetic Linker"
WKQHK

SEQ ID NO: 3772 - protein, 7 aa, Artificial Sequence
  source: /note="Description of Artificial Sequence: Synthetic Linker"
KIQGCSA

SEQ ID NO: 3773 - protein, 8 aa, Artificial Sequence
  source: /note="Description of Artificial Sequence: Synthetic Linker"
DVASGDGL

SEQ ID NO: 3774 - protein, 20 aa, Artificial Sequence
  source: /note="Description of Artificial Sequence: Synthetic Linker"
VSPWHRMSYFFNPVSNFISF

SEQ ID NO: 3775 - protein, 5 aa, Artificial Sequence
  source: /note="Description of Artificial Sequence: Synthetic Linker"
YDNDE

SEQ ID NO: 3776 - protein, 10 aa, Artificial Sequence
  source: /note="Description of Artificial Sequence: Synthetic Linker"
RNGDSRRPGL

SEQ ID NO: 3777 - protein, 4 aa, Artificial Sequence
  source: /note="Description of Artificial Sequence: Synthetic Linker"
VEET

SEQ ID NO: 3778 - protein, 6 aa, Artificial Sequence
  source: /note="Description of Artificial Sequence: Synthetic Linker"
AIQDIS

SEQ ID NO: 3779 - protein, 6 aa, Artificial Sequence
  source: /note="Description of Artificial Sequence: Synthetic Linker"
KLPITL

SEQ ID NO: 3780 - protein, 11 aa, Artificial Sequence
  source: /note="Description of Artificial Sequence: Synthetic Linker"
ADSAYITYAND

SEQ ID NO: 3781 - protein, 4 aa, Artificial Sequence
  source: /note="Description of Artificial Sequence: Synthetic Linker"
FGGV

SEQ ID NO: 3782 - protein, 4 aa, Artificial Sequence
  source: /note="Description of Artificial Sequence: Synthetic Linker"
YGIK

SEQ ID NO: 3783 - protein, 5 aa, Artificial Sequence
  source: /note="Description of Artificial Sequence: Synthetic Linker"
INFNS

SEQ ID NO: 3784 - protein, 5 aa, Artificial Sequence
  source: /note="Description of Artificial Sequence: Synthetic Linker"
YGRDH

SEQ ID NO: 3785 - protein, 6 aa, Artificial Sequence
  source: /note="Description of Artificial Sequence: Synthetic Linker"
GMSRTN

SEQ ID NO: 3786 - protein, 7 aa, Artificial Sequence
  source: /note="Description of Artificial Sequence: Synthetic Linker"
ASLGING

SEQ ID NO: 3787 - protein, 7 aa, Artificial Sequence
  source: /note="Description of Artificial Sequence: Synthetic Linker"
SAPRLQH

SEQ ID NO: 3788 - protein, 7 aa, Artificial Sequence
  source: /note="Description of Artificial Sequence: Synthetic Linker"
YIPDFGG

SEQ ID NO: 3789 - protein, 8 aa, Artificial Sequence
  source: /note="Description of Artificial Sequence: Synthetic Linker"
SLPNYLAP

SEQ ID NO: 3790 - protein, 9 aa, Artificial Sequence
  source: /note="Description of Artificial Sequence: Synthetic Linker"
LDGKFADNV

SEQ ID NO: 3791 - protein, 9 aa, Artificial Sequence
  source: /note="Description of Artificial Sequence: Synthetic Linker"
VINNVNADP

SEQ ID NO: 3792 - protein, 10 aa, Artificial Sequence
  source: /note="Description of Artificial Sequence: Synthetic Linker"
QTQHALEKLS

SEQ ID NO: 3793 - protein, 11 aa, Artificial Sequence
  source: /note="Description of Artificial Sequence: Synthetic Linker"
EGKVFKTRHTG

SEQ ID NO: 3794 - protein, 11 aa, Artificial Sequence
  source: /note="Description of Artificial Sequence: Synthetic Linker"
VKADSEGQPGP

SEQ ID NO: 3795 - protein, 12 aa, Artificial Sequence
  source: /note="Description of Artificial Sequence: Synthetic Linker"
RAFVYHPDIEDR

SEQ ID NO: 3796 - protein, 13 aa, Artificial Sequence
  source: /note="Description of Artificial Sequence: Synthetic Linker"
AFGDVDTADPLDP

SEQ ID NO: 3797 - protein, 13 aa, Artificial Sequence
  source: /note="Description of Artificial Sequence: Synthetic Linker"
LKTETHARGEGST

SEQ ID NO: 3798 - protein, 16 aa, Artificial Sequence
  source: /note="Description of Artificial Sequence: Synthetic Linker"
KNGPIDFQPREPFSAL

SEQ ID NO: 3799 - protein, 16 aa, Artificial Sequence
  source: /note="Description of Artificial Sequence: Synthetic Linker"
VINPGTDRNWTGHPFV

SEQ ID NO: 3800 - protein, 17 aa, Artificial Sequence
  source: /note="Description of Artificial Sequence: Synthetic Linker"
QITQEYFGFATHLAYQG

SEQ ID NO: 3801 - protein, 22 aa, Artificial Sequence
  source: /note="Description of Artificial Sequence: Synthetic Linker"
NHWDNLNRVVERGYAGLSLWDW

SEQ ID NO: 3802 - protein, 15 aa, Artificial Sequence
  source: /note="Description of Artificial Sequence: Synthetic Linker"
VGSLVSGPSFTSGEV

SEQ ID NO: 3803 - protein, 13 aa, Artificial Sequence
  source: /note="Description of Artificial Sequence: Synthetic Linker"
ITSQETDGWYTLA

SEQ ID NO: 3804 - protein, 21 aa, Artificial Sequence
  source: /note="Description of Artificial Sequence: Synthetic Linker"
RNKEGQDVNEQGQPIRGRTQD

SEQ ID NO: 3805 - protein, 5 aa, Artificial Sequence
  source: /note="Description of Artificial Sequence: Synthetic Linker"
HFQPF

SEQ ID NO: 3806 - protein, 5 aa, Artificial Sequence
  source: /note="Description of Artificial Sequence: Synthetic Linker"
TGTPV

SEQ ID NO: 3807 - protein, 7 aa, Artificial Sequence
  source: /note="Description of Artificial Sequence: Synthetic Linker"
PLSHFDA

SEQ ID NO: 3808 - protein, 4 aa, Artificial Sequence
  source: /note="Description of Artificial Sequence: Synthetic Linker"
FNPI

SEQ ID NO: 3809 - protein, 4 aa, Artificial Sequence
  source: /note="Description of Artificial Sequence: Synthetic Linker"
KNGS

SEQ ID NO: 3810 - protein, 5 aa, Artificial Sequence
  source: /note="Description of Artificial Sequence: Synthetic Linker"
DRFQG

SEQ ID NO: 3811 - protein, 5 aa, Artificial Sequence
  source: /note="Description of Artificial Sequence: Synthetic Linker"
EVPDI

SEQ ID NO: 3812 - protein, 6 aa, Artificial Sequence
  source: /note="Description of Artificial Sequence: Synthetic Linker"
ACELHT

SEQ ID NO: 3813 - protein, 6 aa, Artificial Sequence
  source: /note="Description of Artificial Sequence: Synthetic Linker"
LPATLT

SEQ ID NO: 3814 - protein, 6 aa, Artificial Sequence
  source: /note="Description of Artificial Sequence: Synthetic Linker"
LPDPYG

SEQ ID NO: 3815 - protein, 6 aa, Artificial Sequence
  source: /note="Description of Artificial Sequence: Synthetic Linker"
LPHAQP

SEQ ID NO: 3816 - protein, 6 aa, Artificial Sequence
  source: /note="Description of Artificial Sequence: Synthetic Linker"
RQQASF

SEQ ID NO: 3817 - protein, 6 aa, Artificial Sequence
  source: /note="Description of Artificial Sequence: Synthetic Linker"
YIGGNL

SEQ ID NO: 3818 - protein, 7 aa, Artificial Sequence
  source: /note="Description of Artificial Sequence: Synthetic Linker"
FGRTCKE

SEQ ID NO: 3819 - protein, 7 aa, Artificial Sequence
  source: /note="Description of Artificial Sequence: Synthetic Linker"
VDKGDNV

SEQ ID NO: 3820 - protein, 7 aa, Artificial Sequence
  source: /note="Description of Artificial Sequence: Synthetic Linker"
WGPECNH

SEQ ID NO: 3821 - protein, 8 aa, Artificial Sequence
  source: /note="Description of Artificial Sequence: Synthetic Linker"
VRRCEAQK

SEQ ID NO: 3822 - protein, 9 aa, Artificial Sequence
  source: /note="Description of Artificial Sequence: Synthetic Linker"
KVLIKEEDA

SEQ ID NO: 3823 - protein, 9 aa, Artificial Sequence
  source: /note="Description of Artificial Sequence: Synthetic Linker"
SCATGWKGL

SEQ ID NO: 3824 - protein, 10 aa, Artificial Sequence
  source: /note="Description of Artificial Sequence: Synthetic Linker"
IVDLPDHIEV

SEQ ID NO: 3825 - protein, 10 aa, Artificial Sequence
  source: /note="Description of Artificial Sequence: Synthetic Linker"
LCTACMNNGV

SEQ ID NO: 3826 - protein, 13 aa, Artificial Sequence
  source: /note="Description of Artificial Sequence: Synthetic Linker"
RCSGQEGCKSYVF

SEQ ID NO: 3827 - protein, 22 aa, Artificial Sequence
  source: /note="Description of Artificial Sequence: Synthetic Linker"
LCSPGWQGLQCEREGIPRMTPK

SEQ ID NO: 3828 - protein, 25 aa, Artificial Sequence
  source: /note="Description of Artificial Sequence: Synthetic Linker"
CNEACHPGFYGPDCKLRCSCNNGEM

SEQ ID NO: 3829 - protein, 4 aa, Artificial Sequence
  source: /note="Description of Artificial Sequence: Synthetic Linker"
LKTP

SEQ ID NO: 3830 - protein, 14 aa, Artificial Sequence
  source: /note="Description of Artificial Sequence: Synthetic Linker"
AKGRRAEDGSVIDY

SEQ ID NO: 3831 - protein, 12 aa, Artificial Sequence
  source: /note="Description of Artificial Sequence: Synthetic Linker"
AARPLRVHRRPL

SEQ ID NO: 3832 - protein, 4 aa, Artificial Sequence
  source: /note="Description of Artificial Sequence: Synthetic Linker"
LIPL

SEQ ID NO: 3833 - protein, 5 aa, Artificial Sequence
  source: /note="Description of Artificial Sequence: Synthetic Linker"
FGEGA

SEQ ID NO: 3834 - protein, 6 aa, Artificial Sequence
  source: /note="Description of Artificial Sequence: Synthetic Linker"
AFDDAK

SEQ ID NO: 3835 - protein, 6 aa, Artificial Sequence
  source: /note="Description of Artificial Sequence: Synthetic Linker"
KVNGKR

SEQ ID NO: 3836 - protein, 7 aa, Artificial Sequence
  source: /note="Description of Artificial Sequence: Synthetic Linker"
LSKTGMP

SEQ ID NO: 3837 - protein, 8 aa, Artificial Sequence
  source: /note="Description of Artificial Sequence: Synthetic Linker"
VLPYPRMR

SEQ ID NO: 3838 - protein, 8 aa, Artificial Sequence
  source: /note="Description of Artificial Sequence: Synthetic Linker"
VRADDGLL

SEQ ID NO: 3839 - protein, 16 aa, Artificial Sequence
  source: /note="Description of Artificial Sequence: Synthetic Linker"
EAEDDFKIEKPTKEDA

SEQ ID NO: 3840 - protein, 5 aa, Artificial Sequence
  source: /note="Description of Artificial Sequence: Synthetic Linker"
IRFGR

SEQ ID NO: 3841 - protein, 6 aa, Artificial Sequence
  source: /note="Description of Artificial Sequence: Synthetic Linker"
QTETHV

SEQ ID NO: 3842 - protein, 13 aa, Artificial Sequence
  source: /note="Description of Artificial Sequence: Synthetic Linker"
PLKGRYTPSVGDV

SEQ ID NO: 3843 - protein, 7 aa, Artificial Sequence
  source: /note="Description of Artificial Sequence: Synthetic Linker"
KNPALSD

SEQ ID NO: 3844 - protein, 12 aa, Artificial Sequence
  source: /note="Description of Artificial Sequence: Synthetic Linker"
RFGSSEIGKGKK

SEQ ID NO: 3845 - protein, 14 aa, Artificial Sequence
  source: /note="Description of Artificial Sequence: Synthetic Linker"
GKFSGRKGTWVGFT

SEQ ID NO: 3846 - protein, 9 aa, Artificial Sequence
  source: /note="Description of Artificial Sequence: Synthetic Linker"
QFFMSDKPL

SEQ ID NO: 3847 - protein, 11 aa, Artificial Sequence
  source: /note="Description of Artificial Sequence: Synthetic Linker"
HAPRDMGPQPR

SEQ ID NO: 3848 - protein, 12 aa, Artificial Sequence
  source: /note="Description of Artificial Sequence: Synthetic Linker"
HFKPAPWNGLPA

SEQ ID NO: 3849 - protein, 6 aa, Artificial Sequence
  source: /note="Description of Artificial Sequence: Synthetic Linker"
LDPPKQ

SEQ ID NO: 3850 - protein, 6 aa, Artificial Sequence
  source: /note="Description of Artificial Sequence: Synthetic Linker"
TATADD

SEQ ID NO: 3851 - protein, 7 aa, Artificial Sequence
  source: /note="Description of Artificial Sequence: Synthetic Linker"
AEAQTCR

SEQ ID NO: 3852 - protein, 7 aa, Artificial Sequence
  source: /note="Description of Artificial Sequence: Synthetic Linker"
EEKPQGQ

SEQ ID NO: 3853 - protein, 7 aa, Artificial Sequence
  source: /note="Description of Artificial Sequence: Synthetic Linker"
LGLNDPL

SEQ ID NO: 3854 - protein, 7 aa, Artificial Sequence
  source: /note="Description of Artificial Sequence: Synthetic Linker"
RFPTLPF

SEQ ID NO: 3855 - protein, 9 aa, Artificial Sequence
  source: /note="Description of Artificial Sequence: Synthetic Linker"
ISSFDRPNI

SEQ ID NO: 3856 - protein, 13 aa, Artificial Sequence
  source: /note="Description of Artificial Sequence: Synthetic Linker"
YFGEGRQEPCGNC

SEQ ID NO: 3857 - protein, 7 aa, Artificial Sequence
  source: /note="Description of Artificial Sequence: Synthetic Linker"
LGLNRKW

SEQ ID NO: 3858 - protein, 12 aa, Artificial Sequence
  source: /note="Description of Artificial Sequence: Synthetic Linker"
YFGSYGTRGVGY

SEQ ID NO: 3859 - protein, 4 aa, Artificial Sequence
  source: /note="Description of Artificial Sequence: Synthetic Linker"
NIKG

SEQ ID NO: 3860 - protein, 5 aa, Artificial Sequence
  source: /note="Description of Artificial Sequence: Synthetic Linker"
NPVPQ

SEQ ID NO: 3861 - protein, 6 aa, Artificial Sequence
  source: /note="Description of Artificial Sequence: Synthetic Linker"
AKFPAD

SEQ ID NO: 3862 - protein, 6 aa, Artificial Sequence
  source: /note="Description of Artificial Sequence: Synthetic Linker"
IQNVDF

SEQ ID NO: 3863 - protein, 6 aa, Artificial Sequence
  source: /note="Description of Artificial Sequence: Synthetic Linker"
LTGQMV

SEQ ID NO: 3864 - protein, 8 aa, Artificial Sequence
  source: /note="Description of Artificial Sequence: Synthetic Linker"
AAEDARQY

SEQ ID NO: 3865 - protein, 16 aa, Artificial Sequence
  source: /note="Description of Artificial Sequence: Synthetic Linker"
KLDGSQTSKWLSSEPL

SEQ ID NO: 3866 - protein, 4 aa, Artificial Sequence
  source: /note="Description of Artificial Sequence: Synthetic Linker"
DIFK

SEQ ID NO: 3867 - protein, 4 aa, Artificial Sequence
  source: /note="Description of Artificial Sequence: Synthetic Linker"
LPGM

SEQ ID NO: 3868 - protein, 6 aa, Artificial Sequence
  source: /note="Description of Artificial Sequence: Synthetic Linker"
IPGNGG

SEQ ID NO: 3869 - protein, 6 aa, Artificial Sequence
  source: /note="Description of Artificial Sequence: Synthetic Linker"
VEDWVE

SEQ ID NO: 3870 - protein, 15 aa, Artificial Sequence
  source: /note="Description of Artificial Sequence: Synthetic Linker"
RLKADETYTSPEDYF

SEQ ID NO: 3871 - protein, 5 aa, Artificial Sequence
  source: /note="Description of Artificial Sequence: Synthetic Linker"
RKPTE

SEQ ID NO: 3872 - protein, 6 aa, Artificial Sequence
  source: /note="Description of Artificial Sequence: Synthetic Linker"
YARTIV

SEQ ID NO: 3873 - protein, 4 aa, Artificial Sequence
  source: /note="Description of Artificial Sequence: Synthetic Linker"
REDG

SEQ ID NO: 3874 - protein, 4 aa, Artificial Sequence
  source: /note="Description of Artificial Sequence: Synthetic Linker"
YKTL

SEQ ID NO: 3875 - protein, 6 aa, Artificial Sequence
  source: /note="Description of Artificial Sequence: Synthetic Linker"
DRAKRI

SEQ ID NO: 3876 - protein, 11 aa, Artificial Sequence
  source: /note="Description of Artificial Sequence: Synthetic Linker"
KAPQTEPPASI

SEQ ID NO: 3877 - protein, 21 aa, Artificial Sequence
  source: /note="Description of Artificial Sequence: Synthetic Linker"
AAQSDRPAHAQGVPLTRIERT

SEQ ID NO: 3878 - protein, 8 aa, Artificial Sequence
  source: /note="Description of Artificial Sequence: Synthetic Linker"
DWDKDADP

SEQ ID NO: 3879 - protein, 14 aa, Artificial Sequence
  source: /note="Description of Artificial Sequence: Synthetic Linker"
LFDRHVSSSVRLND

SEQ ID NO: 3880 - protein, 26 aa, Artificial Sequence
  source: /note="Description of Artificial Sequence: Synthetic Linker"
LVEESSRQLPTAAPEPAKVDQDAGRL

SEQ ID NO: 3881 - protein, 6 aa, Artificial Sequence
  source: /note="Description of Artificial Sequence: Synthetic Linker"
LLGVTP

SEQ ID NO: 3882 - protein, 4 aa, Artificial Sequence
  source: /note="Description of Artificial Sequence: Synthetic Linker"
DTLP

SEQ ID NO: 3883 - protein, 4 aa, Artificial Sequence
  source: /note="Description of Artificial Sequence: Synthetic Linker"
ENGL

SEQ ID NO: 3884 - protein, 4 aa, Artificial Sequence
  source: /note="Description of Artificial Sequence: Synthetic Linker"
FREV

SEQ ID NO: 3885 - protein, 4 aa, Artificial Sequence
  source: /note="Description of Artificial Sequence: Synthetic Linker"
KVSP

SEQ ID NO: 3886 - protein, 4 aa, Artificial Sequence
  source: /note="Description of Artificial Sequence: Synthetic Linker"
LDGK

SEQ ID NO: 3887 - protein, 4 aa, Artificial Sequence
  source: /note="Description of Artificial Sequence: Synthetic Linker"
LNGK

SEQ ID NO: 3888 - protein, 4 aa, Artificial Sequence
  source: /note="Description of Artificial Sequence: Synthetic Linker"
PLLI

SEQ ID NO: 3889 - protein, 4 aa, Artificial Sequence
  source: /note="Description of Artificial Sequence: Synthetic Linker"
SGQT

SEQ ID NO: 3890 - protein, 5 aa, Artificial Sequence
  source: /note="Description of Artificial Sequence: Synthetic Linker"
KNPRG

SEQ ID NO: 3891 - protein, 5 aa, Artificial Sequence
  source: /note="Description of Artificial Sequence: Synthetic Linker"
KPTTQ

SEQ ID NO: 3892 - protein, 5 aa, Artificial Sequence
  source: /note="Description of Artificial Sequence: Synthetic Linker"
SLKWK

SEQ ID NO: 3893 - protein, 5 aa, Artificial Sequence
  source: /note="Description of Artificial Sequence: Synthetic Linker"
TSEMD

SEQ ID NO: 3894 - protein, 6 aa, Artificial Sequence
  source: /note="Description of Artificial Sequence: Synthetic Linker"
LSGQEA

SEQ ID NO: 3895 - protein, 9 aa, Artificial Sequence
  source: /note="Description of Artificial Sequence: Synthetic Linker"
PLDVAPQGK

SEQ ID NO: 3896 - protein, 11 aa, Artificial Sequence
  source: /note="Description of Artificial Sequence: Synthetic Linker"
AKNTYDDSAWT

SEQ ID NO: 3897 - protein, 12 aa, Artificial Sequence
  source: /note="Description of Artificial Sequence: Synthetic Linker"
ELPELPQPESAG

SEQ ID NO: 3898 - protein, 12 aa, Artificial Sequence
  source: /note="Description of Artificial Sequence: Synthetic Linker"
QPNATAWSEAGH

SEQ ID NO: 3899 - protein, 12 aa, Artificial Sequence
  source: /note="Description of Artificial Sequence: Synthetic Linker"
SEYLFRHSDNEL

SEQ ID NO: 3900 - protein, 13 aa, Artificial Sequence
  source: /note="Description of Artificial Sequence: Synthetic Linker"
VAYTAPKVQLPSL

SEQ ID NO: 3901 - protein, 15 aa, Artificial Sequence
  source: /note="Description of Artificial Sequence: Synthetic Linker"
NLSVTLPAASHAIPH

SEQ ID NO: 3902 - protein, 16 aa, Artificial Sequence
  source: /note="Description of Artificial Sequence: Synthetic Linker"
IDNMGLDEDWTIGSED

SEQ ID NO: 3903 - protein, 23 aa, Artificial Sequence
  source: /note="Description of Artificial Sequence: Synthetic Linker"
TGNLGGENYRDTVRGPLNEGGLY

SEQ ID NO: 3904 - protein, 10 aa, Artificial Sequence
  source: /note="Description of Artificial Sequence: Synthetic Linker"
SNADLQTLPA

SEQ ID NO: 3905 - protein, 11 aa, Artificial Sequence
  source: /note="Description of Artificial Sequence: Synthetic Linker"
LRGKIVPTPMQ

SEQ ID NO: 3906 - protein, 12 aa, Artificial Sequence
  source: /note="Description of Artificial Sequence: Synthetic Linker"
KGGVAYRLPVPG

SEQ ID NO: 3907 - protein, 11 aa, Artificial Sequence
  source: /note="Description of Artificial Sequence: Synthetic Linker"
QAWATAPYAPT

SEQ ID NO: 3908 - protein, 7 aa, Artificial Sequence
  source: /note="Description of Artificial Sequence: Synthetic Linker"
YSKGVSQ

SEQ ID NO: 3909 - protein, 6 aa, Artificial Sequence
  source: /note="Description of Artificial Sequence: Synthetic Linker"
QKGRVL

SEQ ID NO: 3910 - protein, 6 aa, Artificial Sequence
  source: /note="Description of Artificial Sequence: Synthetic Linker"
VLGKEL

SEQ ID NO: 3911 - protein, 4 aa, Artificial Sequence
  source: /note="Description of Artificial Sequence: Synthetic Linker"
ANTP

SEQ ID NO: 3912 - protein, 4 aa, Artificial Sequence
  source: /note="Description of Artificial Sequence: Synthetic Linker"
DAPT

SEQ ID NO: 3913 - protein, 5 aa, Artificial Sequence
  source: /note="Description of Artificial Sequence: Synthetic Linker"
LDPIK

SEQ ID NO: 3914 - protein, 5 aa, Artificial Sequence
  source: /note="Description of Artificial Sequence: Synthetic Linker"
TTDFQ

SEQ ID NO: 3915 - protein, 6 aa, Artificial Sequence
  source: /note="Description of Artificial Sequence: Synthetic Linker"
PWNKEV

SEQ ID NO: 3916 - protein, 6 aa, Artificial Sequence
  source: /note="Description of Artificial Sequence: Synthetic Linker"
QQLLPP

SEQ ID NO: 3917 - protein, 8 aa, Artificial Sequence
  source: /note="Description of Artificial Sequence: Synthetic Linker"
TDPQTGKT

SEQ ID NO: 3918 - protein, 9 aa, Artificial Sequence
  source: /note="Description of Artificial Sequence: Synthetic Linker"
GRHGIVPTR

SEQ ID NO: 3919 - protein, 9 aa, Artificial Sequence
  source: /note="Description of Artificial Sequence: Synthetic Linker"
TADGSWFFK

SEQ ID NO: 3920 - protein, 12 aa, Artificial Sequence
  source: /note="Description of Artificial Sequence: Synthetic Linker"
LFSMGVTRGKWG

SEQ ID NO: 3921 - protein, 18 aa, Artificial Sequence
  source: /note="Description of Artificial Sequence: Synthetic Linker"
LAPGMGEDGELEETGVPA

SEQ ID NO: 3922 - protein, 21 aa, Artificial Sequence
  source: /note="Description of Artificial Sequence: Synthetic Linker"
CWVMHPGESWHGFKDIPDNWS

SEQ ID NO: 3923 - protein, 7 aa, Artificial Sequence
  source: /note="Description of Artificial Sequence: Synthetic Linker"
EVHVRGH

SEQ ID NO: 3924 - protein, 17 aa, Artificial Sequence
  source: /note="Description of Artificial Sequence: Synthetic Linker"
VGDPGPICRPWECCDKA

SEQ ID NO: 3925 - protein, 7 aa, Artificial Sequence
  source: /note="Description of Artificial Sequence: Synthetic Linker"
KYEIPEG

SEQ ID NO: 3926 - protein, 7 aa, Artificial Sequence
  source: /note="Description of Artificial Sequence: Synthetic Linker"
RKVCEQE

SEQ ID NO: 3927 - protein, 12 aa, Artificial Sequence
  source: /note="Description of Artificial Sequence: Synthetic Linker"
EQLLPKLFDGCY

SEQ ID NO: 3928 - protein, 5 aa, Artificial Sequence
  source: /note="Description of Artificial Sequence: Synthetic Linker"
SLHFS

SEQ ID NO: 3929 - protein, 6 aa, Artificial Sequence
  source: /note="Description of Artificial Sequence: Synthetic Linker"
VYPLQW

SEQ ID NO: 3930 - protein, 7 aa, Artificial Sequence
  source: /note="Description of Artificial Sequence: Synthetic Linker"
KTVSGLY

SEQ ID NO: 3931 - protein, 12 aa, Artificial Sequence
  source: /note="Description of Artificial Sequence: Synthetic Linker"
SDPAFQPPCSEV

SEQ ID NO: 3932 - protein, 13 aa, Artificial Sequence
  source: /note="Description of Artificial Sequence: Synthetic Linker"
SVVKPIGLAPLVY

SEQ ID NO: 3933 - protein, 30 aa, Artificial Sequence
  source: /note="Description of Artificial Sequence: Synthetic Linker"
ARWHSRLGFFRDPRPFPLPLSSLFSDGGNV

SEQ ID NO: 3934 - protein, 15 aa, Artificial Sequence
  source: /note="Description of Artificial Sequence: Synthetic Linker"
ELRSLTRHPKYKTEL

SEQ ID NO: 3935 - protein, 7 aa, Artificial Sequence
  source: /note="Description of Artificial Sequence: Synthetic Linker"
VYNTFCI

SEQ ID NO: 3936 - protein, 4 aa, Artificial Sequence
  source: /note="Description of Artificial Sequence: Synthetic Linker"
AATM

SEQ ID NO: 3937 - protein, 4 aa, Artificial Sequence
  source: /note="Description of Artificial Sequence: Synthetic Linker"
FAGT

SEQ ID NO: 3938 - protein, 4 aa, Artificial Sequence
  source: /note="Description of Artificial Sequence: Synthetic Linker"
RGDF

SEQ ID NO: 3939 - protein, 4 aa, Artificial Sequence
  source: /note="Description of Artificial Sequence: Synthetic Linker"
SNPW

SEQ ID NO: 3940 - protein, 4 aa, Artificial Sequence
  source: /note="Description of Artificial Sequence: Synthetic Linker"
SPDK

SEQ ID NO: 3941 - protein, 7 aa, Artificial Sequence
  source: /note="Description of Artificial Sequence: Synthetic Linker"
KTADQQD

SEQ ID NO: 3942 - protein, 8 aa, Artificial Sequence
  source: /note="Description of Artificial Sequence: Synthetic Linker"
QGAGAVDA

SEQ ID NO: 3943 - protein, 9 aa, Artificial Sequence
  source: /note="Description of Artificial Sequence: Synthetic Linker"
AKQDDDSHY

SEQ ID NO: 3944 - protein, 9 aa, Artificial Sequence
  source: /note="Description of Artificial Sequence: Synthetic Linker"
DKDNTSSKV

SEQ ID NO: 3945 - protein, 9 aa, Artificial Sequence
  source: /note="Description of Artificial Sequence: Synthetic Linker"
NLSALEKPI

SEQ ID NO: 3946 - protein, 11 aa, Artificial Sequence
  source: /note="Description of Artificial Sequence: Synthetic Linker"
IHRHANGKPYA

SEQ ID NO: 3947 - protein, 16 aa, Artificial Sequence
  source: /note="Description of Artificial Sequence: Synthetic Linker"
EGVENIEDIESSEITE

SEQ ID NO: 3948 - protein, 36 aa, Artificial Sequence
  source: /note="Description of Artificial Sequence: Synthetic Linker"
DSKDGSSYYHEANSDAKDQLDGDGLQFYALKNNFTA

SEQ ID NO: 3949 - protein, 9 aa, Artificial Sequence
  source: /note="Description of Artificial Sequence: Synthetic Linker"
GSIQGQDLS

SEQ ID NO: 3950 - protein, 4 aa, Artificial Sequence
  source: /note="Description of Artificial Sequence: Synthetic Linker"
RFDT

SEQ ID NO: 3951 - protein, 15 aa, Artificial Sequence
  source: /note="Description of Artificial Sequence: Synthetic Linker"
TLTTPASNQLLALPR

SEQ ID NO: 3952 - protein, 4 aa, Artificial Sequence
  source: /note="Description of Artificial Sequence: Synthetic Linker"
ELPF

SEQ ID NO: 3953 - protein, 7 aa, Artificial Sequence
  source: /note="Description of Artificial Sequence: Synthetic Linker"
AGDNPDA

SEQ ID NO: 3954 - protein, 7 aa, Artificial Sequence
  source: /note="Description of Artificial Sequence: Synthetic Linker"
VTTAEAY

SEQ ID NO: 3955 - protein, 11 aa, Artificial Sequence
  source: /note="Description of Artificial Sequence: Synthetic Linker"
AFPGLNGMDLA

SEQ ID NO: 3956 - protein, 18 aa, Artificial Sequence
  source: /note="Description of Artificial Sequence: Synthetic Linker"
WTQGSWTLTGGLPQAKKE

SEQ ID NO: 3957 - protein, 16 aa, Artificial Sequence
  source: /note="Description of Artificial Sequence: Synthetic Linker"
RGIKLTKIKLDLPINF

SEQ ID NO: 3958 - protein, 4 aa, Artificial Sequence
  source: /note="Description of Artificial Sequence: Synthetic Linker"
FLDV

SEQ ID NO: 3959 - protein, 5 aa, Artificial Sequence
  source: /note="Description of Artificial Sequence: Synthetic Linker"
QTSLS

SEQ ID NO: 3960 - protein, 26 aa, Artificial Sequence
  source: /note="Description of Artificial Sequence: Synthetic Linker"
YTGKWGLNDVNPEAWPRDLKGMAAVR

SEQ ID NO: 3961 - protein, 17 aa, Artificial Sequence
  source: /note="Description of Artificial Sequence: Synthetic Linker"
VKEGAGQPDFCDGHSPA

SEQ ID NO: 3962 - protein, 9 aa, Artificial Sequence
  source: /note="Description of Artificial Sequence: Synthetic Linker"
VDGSRGDGS

SEQ ID NO: 3963 - protein, 41 aa, Artificial Sequence
  source: /note="Description of Artificial Sequence: Synthetic Linker"
LKARVGSADDAKKDAAKKDDAKKDDAKKDGSQTNKAKNLVQ

SEQ ID NO: 3964 - protein, 7 aa, Artificial Sequence
  source: /note="Description of Artificial Sequence: Synthetic Linker"
VAKEGET

SEQ ID NO: 3965 - protein, 14 aa, Artificial Sequence
  source: /note="Description of Artificial Sequence: Synthetic Linker"
TMKNTGRNVNDRPV

SEQ ID NO: 3966 - protein, 4 aa, Artificial Sequence
  source: /note="Description of Artificial Sequence: Synthetic Linker"
EVND

SEQ ID NO: 3967 - protein, 4 aa, Artificial Sequence
  source: /note="Description of Artificial Sequence: Synthetic Linker"
NSDG

SEQ ID NO: 3968 - protein, 4 aa, Artificial Sequence
  source: /note="Description of Artificial Sequence: Synthetic Linker"
TPYG

SEQ ID NO: 3969 - protein, 5 aa, Artificial Sequence
  source: /note="Description of Artificial Sequence: Synthetic Linker"
GRGNP

SEQ ID NO: 3970 - protein, 5 aa, Artificial Sequence
  source: /note="Description of Artificial Sequence: Synthetic Linker"
SENPV

SEQ ID NO: 3971 - protein, 6 aa, Artificial Sequence
  source: /note="Description of Artificial Sequence: Synthetic Linker"
RAQMDL

SEQ ID NO: 3972 - protein, 6 aa, Artificial Sequence
  source: /note="Description of Artificial Sequence: Synthetic Linker"
RTSRNP

SEQ ID NO: 3973 - protein, 6 aa, Artificial Sequence
  source: /note="Description of Artificial Sequence: Synthetic Linker"
YVLNDI

SEQ ID NO: 3974 - protein, 7 aa, Artificial Sequence
  source: /note="Description of Artificial Sequence: Synthetic Linker"
AKKDGTH

SEQ ID NO: 3975 - protein, 8 aa, Artificial Sequence
  source: /note="Description of Artificial Sequence: Synthetic Linker"
DATHIGKL

SEQ ID NO: 3976 - protein, 8 aa, Artificial Sequence
  source: /note="Description of Artificial Sequence: Synthetic Linker"
KQIGGDGM

SEQ ID NO: 3977 - protein, 8 aa, Artificial Sequence
  source: /note="Description of Artificial Sequence: Synthetic Linker"
VLTIPEII

SEQ ID NO: 3978 - protein, 8 aa, Artificial Sequence
  source: /note="Description of Artificial Sequence: Synthetic Linker"
YKFQEGQE

SEQ ID NO: 3979 - protein, 9 aa, Artificial Sequence
  source: /note="Description of Artificial Sequence: Synthetic Linker"
NAKDDEGVL

SEQ ID NO: 3980 - protein, 9 aa, Artificial Sequence
  source: /note="Description of Artificial Sequence: Synthetic Linker"
SYGQFEDGI

SEQ ID NO: 3981 - protein, 10 aa, Artificial Sequence
  source: /note="Description of Artificial Sequence: Synthetic Linker"
HGHVCFQFDA

SEQ ID NO: 3982 - protein, 16 aa, Artificial Sequence
  source: /note="Description of Artificial Sequence: Synthetic Linker"
LFNPWCEDDAVYLDNE

SEQ ID NO: 3983 - protein, 20 aa, Artificial Sequence
  source: /note="Description of Artificial Sequence: Synthetic Linker"
GSWDNIYAYGVPPSAWTGSV

SEQ ID NO: 3984 - protein, 20 aa, Artificial Sequence
  source: /note="Description of Artificial Sequence: Synthetic Linker"
MYGAKKPLNTEGVMKSRSNV

SEQ ID NO: 3985 - protein, 5 aa, Artificial Sequence
  source: /note="Description of Artificial Sequence: Synthetic Linker"
CPPCP

SEQ ID NO: 3986 - protein, 6 aa, Artificial Sequence
  source: /note="Description of Artificial Sequence: Synthetic Linker"
QPKAAP

SEQ ID NO: 3987 - protein, 25 aa, Artificial Sequence
  source: /note="Description of Artificial Sequence: Synthetic Linker"
PPPPPASSTTFSTTRRSSTTSSSPS

SEQ ID NO: 3988 - protein, 27 aa, Artificial Sequence
  source: /note="Description of Artificial Sequence: Synthetic Linker"
GGNPPGGNPPGTTTPRPATSTGSSPGP

SEQ ID NO: 3989 - protein, 33 aa, Artificial Sequence
  source: /note="Description of Artificial Sequence: Synthetic Linker"
GTSTGGSTTTTASGTTSTKASTTSTSSTSTGTG

SEQ ID NO: 3990 - protein, 33 aa, Artificial Sequence
  source: /note="Description of Artificial Sequence: Synthetic Linker"
TVSSSSVSSSHSSTSTSSSHSSSSTPPTQPTGV

SEQ ID NO: 3991 - protein, 34 aa, Artificial Sequence
  source: /note="Description of Artificial Sequence: Synthetic Linker"
GSSGTPPSNPSSSASPTSSTAKPSSTSTASNPSG

SEQ ID NO: 3992 - protein, 41 aa, Artificial Sequence
  source: /note="Description of Artificial Sequence: Synthetic Linker"
ASSSSSTRAASTTSRVSPTTSRSSSATPPPGSTTTRVPPVG

SEQ ID NO: 3993 - protein, 48 aa, Artificial Sequence
  source: /note="Description of Artificial Sequence: Synthetic Linker"
PSSGGTSSSSSAAPQSTSTKASTTTSAVRTTSTATTKTTSSAPAQGTN

SEQ ID NO: 3994 - protein, 6 aa, Artificial Sequence
  source: /note="Description of Artificial Sequence: Synthetic Linker"
ASTKGP

SEQ ID NO: 3995 - protein, 12 aa, Artificial Sequence
  source: /note="Description of Artificial Sequence: Synthetic Linker"
TVAAPSVFIFPP

SEQ ID NO: 3996 - protein, 13 aa, Artificial Sequence
  source: /note="Description of Artificial Sequence: Synthetic Linker"
ASTKGPSVFPLAP

SEQ ID NO: 3997 - protein, 13 aa, Artificial Sequence
  source: /note="Description of Artificial Sequence: Synthetic Linker"
QPKAAPSVTLFPP

SEQ ID NO: 3998 - protein, 5 aa, Artificial Sequence
  source: /note="Description of Artificial Sequence: Synthetic Linker"
RSANS

SEQ ID NO: 3999 - protein, 9 aa, Artificial Sequence
  source: /note="Description of Artificial Sequence: Synthetic Linker"
RPAKLALPP

SEQ ID NO: 4000 - protein, 17 aa, Artificial Sequence
  source: /note="Description of Artificial Sequence: Synthetic Linker"
SLHGFDLASEQHTVRDT

SEQ ID NO: 4001 - protein, 4 aa, Artificial Sequence
  source: /note="Description of Artificial Sequence: Synthetic Linker"
RARI

SEQ ID NO: 4002 - protein, 11 aa, Artificial Sequence
  source: /note="Description of Artificial Sequence: Synthetic Linker"
TKPQLGIREGM

SEQ ID NO: 4003 - protein, 21 aa, Artificial Sequence
  source: /note="Description of Artificial Sequence: Synthetic Linker"
HKPMAAPTTLKAGPLLSSEKL

SEQ ID NO: 4004 - protein, 12 aa, Artificial Sequence
  source: /note="Description of Artificial Sequence: Synthetic Linker"
SLPADRKPGEPV

SEQ ID NO: 4005 - protein, 6 aa, Artificial Sequence
  source: /note="Description of Artificial Sequence: Synthetic Linker"
RRHGEY

SEQ ID NO: 4006 - protein, 7 aa, Artificial Sequence
  source: /note="Description of Artificial Sequence: Synthetic Linker"
ANQNSAE

SEQ ID NO: 4007 - protein, 14 aa, Artificial Sequence
  source: /note="Description of Artificial Sequence: Synthetic Linker"
LTTNLTAFFREAHH

SEQ ID NO: 4008 - protein, 4 aa, Artificial Sequence
  source: /note="Description of Artificial Sequence: Synthetic Linker"
PNQR

SEQ ID NO: 4009 - protein, 5 aa, Artificial Sequence
  source: /note="Description of Artificial Sequence: Synthetic Linker"
ARNDP

SEQ ID NO: 4010 - protein, 5 aa, Artificial Sequence
  source: /note="Description of Artificial Sequence: Synthetic Linker"
LNWTR

SEQ ID NO: 4011 - protein, 6 aa, Artificial Sequence
  source: /note="Description of Artificial Sequence: Synthetic Linker"
DAATDR

SEQ ID NO: 4012 - protein, 6 aa, Artificial Sequence
  source: /note="Description of Artificial Sequence: Synthetic Linker"
DKASGA

SEQ ID NO: 4013 - protein, 6 aa, Artificial Sequence
  source: /note="Description of Artificial Sequence: Synthetic Linker"
GPNGNI

SEQ ID NO: 4014 - protein, 9 aa, Artificial Sequence
  source: /note="Description of Artificial Sequence: Synthetic Linker"
AWDNSDSSV

SEQ ID NO: 4015 - protein, 9 aa, Artificial Sequence
  source: /note="Description of Artificial Sequence: Synthetic Linker"
LAHVGRSLI

SEQ ID NO: 4016 - protein, 9 aa, Artificial Sequence
  source: /note="Description of Artificial Sequence: Synthetic Linker"
TKNPQRGTF

SEQ ID NO: 4017 - protein, 11 aa, Artificial Sequence
  source: /note="Description of Artificial Sequence: Synthetic Linker"
APMPAGLETWV

SEQ ID NO: 4018 - protein, 16 aa, Artificial Sequence
  source: /note="Description of Artificial Sequence: Synthetic Linker"
DTGTLPNLNSEVGAGW

SEQ ID NO: 4019 - protein, 18 aa, Artificial Sequence
  source: /note="Description of Artificial Sequence: Synthetic Linker"
ANHMWNPTGAHQSSIPAL

SEQ ID NO: 4020 - protein, 4 aa, Artificial Sequence
  source: /note="Description of Artificial Sequence: Synthetic Linker"
DATE

SEQ ID NO: 4021 - protein, 7 aa, Artificial Sequence
  source: /note="Description of Artificial Sequence: Synthetic Linker"
RNYLINS

SEQ ID NO: 4022 - protein, 14 aa, Artificial Sequence
  source: /note="Description of Artificial Sequence: Synthetic Linker"
SSPKNLDDKVKLSE

SEQ ID NO: 4023 - protein, 5 aa, Artificial Sequence
  source: /note="Description of Artificial Sequence: Synthetic Linker"
QYQIV

SEQ ID NO: 4024 - protein, 8 aa, Artificial Sequence
  source: /note="Description of Artificial Sequence: Synthetic Linker"
RWLKNASP

SEQ ID NO: 4025 - protein, 14 aa, Artificial Sequence
  source: /note="Description of Artificial Sequence: Synthetic Linker"
NILNDRNPVVTEDV

SEQ ID NO: 4026 - protein, 5 aa, Artificial Sequence
  source: /note="Description of Artificial Sequence: Synthetic Linker"
YTPGE

SEQ ID NO: 4027 - protein, 4 aa, Artificial Sequence
  source: /note="Description of Artificial Sequence: Synthetic Linker"
FGTQ

SEQ ID NO: 4028 - protein, 6 aa, Artificial Sequence
  source: /note="Description of Artificial Sequence: Synthetic Linker"
SLQSGY

SEQ ID NO: 4029 - protein, 6 aa, Artificial Sequence
  source: /note="Description of Artificial Sequence: Synthetic Linker"
TIPANR

SEQ ID NO: 4030 - protein, 9 aa, Artificial Sequence
  source: /note="Description of Artificial Sequence: Synthetic Linker"
KSEKGRNKF

SEQ ID NO: 4031 - protein, 7 aa, Artificial Sequence
  source: /note="Description of Artificial Sequence: Synthetic Linker"
YFNKYSS

SEQ ID NO: 4032 - protein, 8 aa, Artificial Sequence
  source: /note="Description of Artificial Sequence: Synthetic Linker"
YRNPSRNI

SEQ ID NO: 4033 - protein, 4 aa, Artificial Sequence
  source: /note="Description of Artificial Sequence: Synthetic Linker"
YGLN

SEQ ID NO: 4034 - protein, 5 aa, Artificial Sequence
  source: /note="Description of Artificial Sequence: Synthetic Linker"
IMGSV

SEQ ID NO: 4035 - protein, 5 aa, Artificial Sequence
  source: /note="Description of Artificial Sequence: Synthetic Linker"
SGRDA

SEQ ID NO: 4036 - protein, 6 aa, Artificial Sequence
  source: /note="Description of Artificial Sequence: Synthetic Linker"
LIEKGG

SEQ ID NO: 4037 - protein, 7 aa, Artificial Sequence
  source: /note="Description of Artificial Sequence: Synthetic Linker"
DINNISP

SEQ ID NO: 4038 - protein, 7 aa, Artificial Sequence
  source: /note="Description of Artificial Sequence: Synthetic Linker"
GRHVRGI

SEQ ID NO: 4039 - protein, 8 aa, Artificial Sequence
  source: /note="Description of Artificial Sequence: Synthetic Linker"
VRGREPGD

SEQ ID NO: 4040 - protein, 6 aa, Artificial Sequence
  source: /note="Description of Artificial Sequence: Synthetic Linker"
EMEIPE

SEQ ID NO: 4041 - protein, 6 aa, Artificial Sequence
  source: /note="Description of Artificial Sequence: Synthetic Linker"
RMIKSA

SEQ ID NO: 4042 - protein, 4 aa, Artificial Sequence
  source: /note="Description of Artificial Sequence: Synthetic Linker"
GFTP

SEQ ID NO: 4043 - protein, 5 aa, Artificial Sequence
  source: /note="Description of Artificial Sequence: Synthetic Linker"
FKIDV

SEQ ID NO: 4044 - protein, 5 aa, Artificial Sequence
  source: /note="Description of Artificial Sequence: Synthetic Linker"
NLDDP

SEQ ID NO: 4045 - protein, 11 aa, Artificial Sequence
  source: /note="Description of Artificial Sequence: Synthetic Linker"
LQNQQDNRGNI

SEQ ID NO: 4046 - protein, 19 aa, Artificial Sequence
  source: /note="Description of Artificial Sequence: Synthetic Linker"
NPQGQVWIEGREQQPQKNI

SEQ ID NO: 4047 - protein, 35 aa, Artificial Sequence
  source: /note="Description of Artificial Sequence: Synthetic Linker"
RVQGPFSVIRPPLRSQRPQEEVNGLEETICSARCT

SEQ ID NO: 4048 - protein, 53 aa, Artificial Sequence
  source: /note="Description of Artificial Sequence: Synthetic Linker"
DSSVFQPGGGSPFGEGQGQGQQGQGQGHQGQGQGQQGQQGQQGQQSQGQGFRD

SEQ ID NO: 4049 - protein, 5 aa, Artificial Sequence
  source: /note="Description of Artificial Sequence: Synthetic Linker"
CEGSD

SEQ ID NO: 4050 - protein, 7 aa, Artificial Sequence
  source: /note="Description of Artificial Sequence: Synthetic Linker"
VQQQETI

SEQ ID NO: 4051 - protein, 8 aa, Artificial Sequence
  source: /note="Description of Artificial Sequence: Synthetic Linker"
KGINSKKT

SEQ ID NO: 4052 - protein, 12 aa, Artificial Sequence
  source: /note="Description of Artificial Sequence: Synthetic Linker"
RLKLEDRQVDLT

SEQ ID NO: 4053 - protein, 8 aa, Artificial Sequence
  source: /note="Description of Artificial Sequence: Synthetic Linker"
TDSTQIKM

SEQ ID NO: 4054 - protein, 11 aa, Artificial Sequence
  source: /note="Description of Artificial Sequence: Synthetic Linker"
ILLQYNTEDAY

SEQ ID NO: 4055 - protein, 14 aa, Artificial Sequence
  source: /note="Description of Artificial Sequence: Synthetic Linker"
ELVTNCFKNRYTLQ

SEQ ID NO: 4056 - protein, 23 aa, Artificial Sequence
  source: /note="Description of Artificial Sequence: Synthetic Linker"
IKLYLGYKNKKLRVNINVPMKTE

SEQ ID NO: 4057 - protein, 24 aa, Artificial Sequence
  source: /note="Description of Artificial Sequence: Synthetic Linker"
KSKLLVLEDENANVDEVELKPDTL

SEQ ID NO: 4058 - protein, 11 aa, Artificial Sequence
  source: /note="Description of Artificial Sequence: Synthetic Linker"
VLTFDLAAPTV

SEQ ID NO: 4059 - protein, 27 aa, Artificial Sequence
  source: /note="Description of Artificial Sequence: Synthetic Linker"
CPAGNFIGKTATPYTSGTPCGDCPSDC

SEQ ID NO: 4060 - protein, 8 aa, Artificial Sequence
  source: /note="Description of Artificial Sequence: Synthetic Linker"
HLPGREAH

SEQ ID NO: 4061 - protein, 8 aa, Artificial Sequence
  source: /note="Description of Artificial Sequence: Synthetic Linker"
YLPDAFGP

SEQ ID NO: 4062 - protein, 21 aa, Artificial Sequence
  source: /note="Description of Artificial Sequence: Synthetic Linker"
LEIKTLLMDEQDHGYALTGDA

SEQ ID NO: 4063 - protein, 7 aa, Artificial Sequence
  source: /note="Description of Artificial Sequence: Synthetic Linker"
VLAMAKV

SEQ ID NO: 4064 - protein, 4 aa, Artificial Sequence
  source: /note="Description of Artificial Sequence: Synthetic Linker"
FAFG

SEQ ID NO: 4065 - protein, 4 aa, Artificial Sequence
  source: /note="Description of Artificial Sequence: Synthetic Linker"
GPNQ

SEQ ID NO: 4066 - protein, 8 aa, Artificial Sequence
  source: /note="Description of Artificial Sequence: Synthetic Linker"
DEINNPSL

SEQ ID NO: 4067 - protein, 24 aa, Artificial Sequence
  source: /note="Description of Artificial Sequence: Synthetic Linker"
VIPAGKLERVDPTTVRQEGPWADP

SEQ ID NO: 4068 - protein, 15 aa, Artificial Sequence
  source: /note="Description of Artificial Sequence: Synthetic Linker"
LGVSSSEVSRVEADS

SEQ ID NO: 4069 - protein, 6 aa, Artificial Sequence
  source: /note="Description of Artificial Sequence: Synthetic Linker"
AIPDFG

SEQ ID NO: 4070 - protein, 6 aa, Artificial Sequence
  source: /note="Description of Artificial Sequence: Synthetic Linker"
VDPAYR

SEQ ID NO: 4071 - protein, 6 aa, Artificial Sequence
  source: /note="Description of Artificial Sequence: Synthetic Linker"
YAPSSP

SEQ ID NO: 4072 - protein, 23 aa, Artificial Sequence
  source: /note="Description of Artificial Sequence: Synthetic Linker"
ATPQMEEDKGPINHPQYPGDVGL

SEQ ID NO: 4073 - protein, 4 aa, Artificial Sequence
  source: /note="Description of Artificial Sequence: Synthetic Linker"
IWEP

SEQ ID NO: 4074 - protein, 6 aa, Artificial Sequence
  source: /note="Description of Artificial Sequence: Synthetic Linker"
RTDIQT

SEQ ID NO: 4075 - protein, 13 aa, Artificial Sequence
  source: /note="Description of Artificial Sequence: Synthetic Linker"
KIPFTANKFEKNY

SEQ ID NO: 4076 - protein, 10 aa, Artificial Sequence
  source: /note="Description of Artificial Sequence: Synthetic Linker"
LEGDKNALNQ

SEQ ID NO: 4077 - protein, 4 aa, Artificial Sequence
  source: /note="Description of Artificial Sequence: Synthetic Linker"
AGGD

SEQ ID NO: 4078 - protein, 4 aa, Artificial Sequence
  source: /note="Description of Artificial Sequence: Synthetic Linker"
KADV

SEQ ID NO: 4079 - protein, 4 aa, Artificial Sequence
  source: /note="Description of Artificial Sequence: Synthetic Linker"
KGGR

SEQ ID NO: 4080 - protein, 4 aa, Artificial Sequence
  source: /note="Description of Artificial Sequence: Synthetic Linker"
LGTF

SEQ ID NO: 4081 - protein, 4 aa, Artificial Sequence
  source: /note="Description of Artificial Sequence: Synthetic Linker"
LPFL

SEQ ID NO: 4082 - protein, 4 aa, Artificial Sequence
  source: /note="Description of Artificial Sequence: Synthetic Linker"
QKGK

SEQ ID NO: 4083 - protein, 5 aa, Artificial Sequence
  source: /note="Description of Artificial Sequence: Synthetic Linker"
EEKCE

SEQ ID NO: 4084 - protein, 5 aa, Artificial Sequence
  source: /note="Description of Artificial Sequence: Synthetic Linker"
LGAGD

SEQ ID NO: 4085 - protein, 5 aa, Artificial Sequence
  source: /note="Description of Artificial Sequence: Synthetic Linker"
LKSIE

SEQ ID NO: 4086 - protein, 5 aa, Artificial Sequence
  source: /note="Description of Artificial Sequence: Synthetic Linker"
PKTDD

SEQ ID NO: 4087 - protein, 5 aa, Artificial Sequence
  source: /note="Description of Artificial Sequence: Synthetic Linker"
SAFGS

SEQ ID NO: 4088 - protein, 5 aa, Artificial Sequence
  source: /note="Description of Artificial Sequence: Synthetic Linker"
VLRDP

SEQ ID NO: 4089 - protein, 6 aa, Artificial Sequence
  source: /note="Description of Artificial Sequence: Synthetic Linker"
EEGYKA

SEQ ID NO: 4090 - protein, 6 aa, Artificial Sequence
  source: /note="Description of Artificial Sequence: Synthetic Linker"
KDLGVK

SEQ ID NO: 4091 - protein, 6 aa, Artificial Sequence
  source: /note="Description of Artificial Sequence: Synthetic Linker"
LVDISV

SEQ ID NO: 4092 - protein, 6 aa, Artificial Sequence
  source: /note="Description of Artificial Sequence: Synthetic Linker"
NIRAVP

SEQ ID NO: 4093 - protein, 6 aa, Artificial Sequence
  source: /note="Description of Artificial Sequence: Synthetic Linker"
RCGARR

SEQ ID NO: 4094 - protein, 6 aa, Artificial Sequence
  source: /note="Description of Artificial Sequence: Synthetic Linker"
VFRKGF

SEQ ID NO: 4095 - protein, 6 aa, Artificial Sequence
  source: /note="Description of Artificial Sequence: Synthetic Linker"
VIGKAL

SEQ ID NO: 4096 - protein, 7 aa, Artificial Sequence
  source: /note="Description of Artificial Sequence: Synthetic Linker"
IGIGLPE

SEQ ID NO: 4097 - protein, 7 aa, Artificial Sequence
  source: /note="Description of Artificial Sequence: Synthetic Linker"
QDETGKW

SEQ ID NO: 4098 - protein, 7 aa, Artificial Sequence
  source: /note="Description of Artificial Sequence: Synthetic Linker"
VGMANTT

SEQ ID NO: 4099 - protein, 8 aa, Artificial Sequence
  source: /note="Description of Artificial Sequence: Synthetic Linker"
ELSNIEQV

SEQ ID NO: 4100 - protein, 10 aa, Artificial Sequence
  source: /note="Description of Artificial Sequence: Synthetic Linker"
FQGLTQDQGF

SEQ ID NO: 4101 - protein, 12 aa, Artificial Sequence
  source: /note="Description of Artificial Sequence: Synthetic Linker"
CGKSLSENEITL

SEQ ID NO: 4102 - protein, 14 aa, Artificial Sequence
  source: /note="Description of Artificial Sequence: Synthetic Linker"
LQGWDGQSPGTESH

SEQ ID NO: 4103 - protein, 17 aa, Artificial Sequence
  source: /note="Description of Artificial Sequence: Synthetic Linker"
PVPRIAELMGKKLPNFG

SEQ ID NO: 4104 - protein, 18 aa, Artificial Sequence
  source: /note="Description of Artificial Sequence: Synthetic Linker"
QYGASVSAKPELPLFYTP

SEQ ID NO: 4105 - protein, 18 aa, Artificial Sequence
  source: /note="Description of Artificial Sequence: Synthetic Linker"
SKAGMCACHSPLPSIRGA

SEQ ID NO: 4106 - protein, 23 aa, Artificial Sequence
  source: /note="Description of Artificial Sequence: Synthetic Linker"
EQNAAFPPLERKPFIPKKPIPAI

SEQ ID NO: 4107 - protein, 28 aa, Artificial Sequence
  source: /note="Description of Artificial Sequence: Synthetic Linker"
EALSPIKFNRWDLPEVDPETMQTSEPWV

SEQ ID NO: 4108 - protein, 7 aa, Artificial Sequence
  source: /note="Description of Artificial Sequence: Synthetic Linker"
NTGSGKR

SEQ ID NO: 4109 - protein, 7 aa, Artificial Sequence
  source: /note="Description of Artificial Sequence: Synthetic Linker"
TQPVQSS

SEQ ID NO: 4110 - protein, 7 aa, Artificial Sequence
  source: /note="Description of Artificial Sequence: Synthetic Linker"
YTGDNCA

SEQ ID NO: 4111 - protein, 18 aa, Artificial Sequence
  source: /note="Description of Artificial Sequence: Synthetic Linker"
LPRDGLKDPQGKPLHYDR

SEQ ID NO: 4112 - protein, 7 aa, Artificial Sequence
  source: /note="Description of Artificial Sequence: Synthetic Linker"
DDDRIKD

SEQ ID NO: 4113 - protein, 7 aa, Artificial Sequence
  source: /note="Description of Artificial Sequence: Synthetic Linker"
EAEKNQQ

SEQ ID NO: 4114 - protein, 11 aa, Artificial Sequence
  source: /note="Description of Artificial Sequence: Synthetic Linker"
NHLGIDLGETP

SEQ ID NO: 4115 - protein, 13 aa, Artificial Sequence
  source: /note="Description of Artificial Sequence: Synthetic Linker"
RLFESSGCAGKLA

SEQ ID NO: 4116 - protein, 13 aa, Artificial Sequence
  source: /note="Description of Artificial Sequence: Synthetic Linker"
VRHDGRHAHDYDY

SEQ ID NO: 4117 - protein, 15 aa, Artificial Sequence
  source: /note="Description of Artificial Sequence: Synthetic Linker"
RDIEADTPARYNADP

SEQ ID NO: 4118 - protein, 4 aa, Artificial Sequence
  source: /note="Description of Artificial Sequence: Synthetic Linker"
LSSR

SEQ ID NO: 4119 - protein, 4 aa, Artificial Sequence
  source: /note="Description of Artificial Sequence: Synthetic Linker"
SILM

SEQ ID NO: 4120 - protein, 5 aa, Artificial Sequence
  source: /note="Description of Artificial Sequence: Synthetic Linker"
DTSGG

SEQ ID NO: 4121 - protein, 5 aa, Artificial Sequence
  source: /note="Description of Artificial Sequence: Synthetic Linker"
LGDGA

SEQ ID NO: 4122 - protein, 6 aa, Artificial Sequence
  source: /note="Description of Artificial Sequence: Synthetic Linker"
ANNSTL

SEQ ID NO: 4123 - protein, 6 aa, Artificial Sequence
  source: /note="Description of Artificial Sequence: Synthetic Linker"
IDEIQK

SEQ ID NO: 4124 - protein, 6 aa, Artificial Sequence
  source: /note="Description of Artificial Sequence: Synthetic Linker"
KLPSFE

SEQ ID NO: 4125 - protein, 6 aa, Artificial Sequence
  source: /note="Description of Artificial Sequence: Synthetic Linker"
QEVSQC

SEQ ID NO: 4126 - protein, 6 aa, Artificial Sequence
  source: /note="Description of Artificial Sequence: Synthetic Linker"
RSLSTT

SEQ ID NO: 4127 - protein, 6 aa, Artificial Sequence
  source: /note="Description of Artificial Sequence: Synthetic Linker"
SSNHKL

SEQ ID NO: 4128 - protein, 6 aa, Artificial Sequence
  source: /note="Description of Artificial Sequence: Synthetic Linker"
TFESSH

SEQ ID NO: 4129 - protein, 7 aa, Artificial Sequence
  source: /note="Description of Artificial Sequence: Synthetic Linker"
TALRPSA

SEQ ID NO: 4130 - protein, 8 aa, Artificial Sequence
  source: /note="Description of Artificial Sequence: Synthetic Linker"
PLYESPRK

SEQ ID NO: 4131 - protein, 9 aa, Artificial Sequence
  source: /note="Description of Artificial Sequence: Synthetic Linker"
LNSDGYPDS

SEQ ID NO: 4132 - protein, 9 aa, Artificial Sequence
  source: /note="Description of Artificial Sequence: Synthetic Linker"
LWTDISARI

SEQ ID NO: 4133 - protein, 11 aa, Artificial Sequence
  source: /note="Description of Artificial Sequence: Synthetic Linker"
HKEMLGGEIIP

SEQ ID NO: 4134 - protein, 12 aa, Artificial Sequence
  source: /note="Description of Artificial Sequence: Synthetic Linker"
TLGTQPTVLRTF

SEQ ID NO: 4135 - protein, 12 aa, Artificial Sequence
  source: /note="Description of Artificial Sequence: Synthetic Linker"
VFSNVNLKEVNY

SEQ ID NO: 4136 - protein, 13 aa, Artificial Sequence
  source: /note="Description of Artificial Sequence: Synthetic Linker"
NVFACSDRPTVIY

SEQ ID NO: 4137 - protein, 14 aa, Artificial Sequence
  source: /note="Description of Artificial Sequence: Synthetic Linker"
DITPLGDSNGLSPL

SEQ ID NO: 4138 - protein, 14 aa, Artificial Sequence
  source: /note="Description of Artificial Sequence: Synthetic Linker"
FGLNIETGLLSDRK

SEQ ID NO: 4139 - protein, 29 aa, Artificial Sequence
  source: /note="Description of Artificial Sequence: Synthetic Linker"
TQALSSSVSSSKLFSSSTAPHETSFGEEV

SEQ ID NO: 4140 - protein, 4 aa, Artificial Sequence
  source: /note="Description of Artificial Sequence: Synthetic Linker"
EHGV

SEQ ID NO: 4141 - protein, 4 aa, Artificial Sequence
  source: /note="Description of Artificial Sequence: Synthetic Linker"
REGK

SEQ ID NO: 4142 - protein, 5 aa, Artificial Sequence
  source: /note="Description of Artificial Sequence: Synthetic Linker"
TVLHA

SEQ ID NO: 4143 - protein, 6 aa, Artificial Sequence
  source: /note="Description of Artificial Sequence: Synthetic Linker"
ETEKTG

SEQ ID NO: 4144 - protein, 6 aa, Artificial Sequence
  source: /note="Description of Artificial Sequence: Synthetic Linker"
FHYEGG

SEQ ID NO: 4145 - protein, 6 aa, Artificial Sequence
  source: /note="Description of Artificial Sequence: Synthetic Linker"
LDSGVS

SEQ ID NO: 4146 - protein, 6 aa, Artificial Sequence
  source: /note="Description of Artificial Sequence: Synthetic Linker"
PQAPLA

SEQ ID NO: 4147 - protein, 7 aa, Artificial Sequence
  source: /note="Description of Artificial Sequence: Synthetic Linker"
DKRDGKE

SEQ ID NO: 4148 - protein, 8 aa, Artificial Sequence
  source: /note="Description of Artificial Sequence: Synthetic Linker"
IHPEEGVS

SEQ ID NO: 4149 - protein, 14 aa, Artificial Sequence
  source: /note="Description of Artificial Sequence: Synthetic Linker"
PSLETFTNVTEFEY

SEQ ID NO: 4150 - protein, 19 aa, Artificial Sequence
  source: /note="Description of Artificial Sequence: Synthetic Linker"
GGKFDDNSYKVSGGLHGVG

SEQ ID NO: 4151 - protein, 5 aa, Artificial Sequence
  source: /note="Description of Artificial Sequence: Synthetic Linker"
MKPEN

SEQ ID NO: 4152 - protein, 6 aa, Artificial Sequence
  source: /note="Description of Artificial Sequence: Synthetic Linker"
TNISRA

SEQ ID NO: 4153 - protein, 7 aa, Artificial Sequence
  source: /note="Description of Artificial Sequence: Synthetic Linker"
LLESGRL

SEQ ID NO: 4154 - protein, 15 aa, Artificial Sequence
  source: /note="Description of Artificial Sequence: Synthetic Linker"
VWGTKGLANEGKVIG

SEQ ID NO: 4155 - protein, 28 aa, Artificial Sequence
  source: /note="Description of Artificial Sequence: Synthetic Linker"
TLSQWGFFSPYGIGDNDACTINPYDGWA

SEQ ID NO: 4156 - protein, 4 aa, Artificial Sequence
  source: /note="Description of Artificial Sequence: Synthetic Linker"
MERE

SEQ ID NO: 4157 - protein, 7 aa, Artificial Sequence
  source: /note="Description of Artificial Sequence: Synthetic Linker"
FIDKPGI

SEQ ID NO: 4158 - protein, 8 aa, Artificial Sequence
  source: /note="Description of Artificial Sequence: Synthetic Linker"
TLNYTCPT

SEQ ID NO: 4159 - protein, 10 aa, Artificial Sequence
  source: /note="Description of Artificial Sequence: Synthetic Linker"
LLQERQDNLL

SEQ ID NO: 4160 - protein, 12 aa, Artificial Sequence
  source: /note="Description of Artificial Sequence: Synthetic Linker"
QRTTLPHIRSIT

SEQ ID NO: 4161 - protein, 4 aa, Artificial Sequence
  source: /note="Description of Artificial Sequence: Synthetic Linker"
VGGF

SEQ ID NO: 4162 - protein, 5 aa, Artificial Sequence
  source: /note="Description of Artificial Sequence: Synthetic Linker"
AKIQI

SEQ ID NO: 4163 - protein, 5 aa, Artificial Sequence
  source: /note="Description of Artificial Sequence: Synthetic Linker"
KEQNK

SEQ ID NO: 4164 - protein, 7 aa, Artificial Sequence
  source: /note="Description of Artificial Sequence: Synthetic Linker"
PGPKCPF

SEQ ID NO: 4165 - protein, 9 aa, Artificial Sequence
  source: /note="Description of Artificial Sequence: Synthetic Linker"
QLNYISIAS

SEQ ID NO: 4166 - protein, 9 aa, Artificial Sequence
  source: /note="Description of Artificial Sequence: Synthetic Linker"
SANNIAKYD

SEQ ID NO: 4167 - protein, 16 aa, Artificial Sequence
  source: /note="Description of Artificial Sequence: Synthetic Linker"
AIKGNIDAPQVVEGEK

SEQ ID NO: 4168 - protein, 18 aa, Artificial Sequence
  source: /note="Description of Artificial Sequence: Synthetic Linker"
VIPQGRSHPVQPYPGAFV

SEQ ID NO: 4169 - protein, 4 aa, Artificial Sequence
  source: /note="Description of Artificial Sequence: Synthetic Linker"
ETSR

SEQ ID NO: 4170 - protein, 5 aa, Artificial Sequence
  source: /note="Description of Artificial Sequence: Synthetic Linker"
GVGRR

SEQ ID NO: 4171 - protein, 6 aa, Artificial Sequence
  source: /note="Description of Artificial Sequence: Synthetic Linker"
FFLGQI

SEQ ID NO: 4172 - protein, 6 aa, Artificial Sequence
  source: /note="Description of Artificial Sequence: Synthetic Linker"
LEGSSL

SEQ ID NO: 4173 - protein, 8 aa, Artificial Sequence
  source: /note="Description of Artificial Sequence: Synthetic Linker"
DLSQVNEL

SEQ ID NO: 4174 - protein, 8 aa, Artificial Sequence
  source: /note="Description of Artificial Sequence: Synthetic Linker"
KNANGDYF

SEQ ID NO: 4175 - protein, 11 aa, Artificial Sequence
  source: /note="Description of Artificial Sequence: Synthetic Linker"
ILPLPYPNSPV

SEQ ID NO: 4176 - protein, 12 aa, Artificial Sequence
  source: /note="Description of Artificial Sequence: Synthetic Linker"
FADPTIQSQSEI

SEQ ID NO: 4177 - protein, 13 aa, Artificial Sequence
  source: /note="Description of Artificial Sequence: Synthetic Linker"
CGPYFANDNFSLE

SEQ ID NO: 4178 - protein, 15 aa, Artificial Sequence
  source: /note="Description of Artificial Sequence: Synthetic Linker"
PDSPTYDKFLNPESL

SEQ ID NO: 4179 - protein, 4 aa, Artificial Sequence
  source: /note="Description of Artificial Sequence: Synthetic Linker"
TGDL

SEQ ID NO: 4180 - protein, 6 aa, Artificial Sequence
  source: /note="Description of Artificial Sequence: Synthetic Linker"
FDNEYE

SEQ ID NO: 4181 - protein, 7 aa, Artificial Sequence
  source: /note="Description of Artificial Sequence: Synthetic Linker"
SLKFEGD

SEQ ID NO: 4182 - protein, 13 aa, Artificial Sequence
  source: /note="Description of Artificial Sequence: Synthetic Linker"
VFNPEGRDLITDW

SEQ ID NO: 4183 - protein, 15 aa, Artificial Sequence
  source: /note="Description of Artificial Sequence: Synthetic Linker"
GGNYDINSHLPLIPE

SEQ ID NO: 4184 - protein, 5 aa, Artificial Sequence
  source: /note="Description of Artificial Sequence: Synthetic Linker"
RNEQD

SEQ ID NO: 4185 - protein, 4 aa, Artificial Sequence
  source: /note="Description of Artificial Sequence: Synthetic Linker"
KEGK

SEQ ID NO: 4186 - protein, 5 aa, Artificial Sequence
  source: /note="Description of Artificial Sequence: Synthetic Linker"
MEQAM

SEQ ID NO: 4187 - protein, 6 aa, Artificial Sequence
  source: /note="Description of Artificial Sequence: Synthetic Linker"
ILRVNV

SEQ ID NO: 4188 - protein, 7 aa, Artificial Sequence
  source: /note="Description of Artificial Sequence: Synthetic Linker"
LPDGEDP

SEQ ID NO: 4189 - protein, 7 aa, Artificial Sequence
  source: /note="Description of Artificial Sequence: Synthetic Linker"
LSIGIRR

SEQ ID NO: 4190 - protein, 8 aa, Artificial Sequence
  source: /note="Description of Artificial Sequence: Synthetic Linker"
DNAEPNRL

SEQ ID NO: 4191 - protein, 17 aa, Artificial Sequence
  source: /note="Description of Artificial Sequence: Synthetic Linker"
GFVRKAILASFPEGVGI

SEQ ID NO: 4192 - protein, 4 aa, Artificial Sequence
  source: /note="Description of Artificial Sequence: Synthetic Linker"
VDGV

SEQ ID NO: 4193 - protein, 5 aa, Artificial Sequence
  source: /note="Description of Artificial Sequence: Synthetic Linker"
LWNGG

SEQ ID NO: 4194 - protein, 5 aa, Artificial Sequence
  source: /note="Description of Artificial Sequence: Synthetic Linker"
RGISK

SEQ ID NO: 4195 - protein, 7 aa, Artificial Sequence
  source: /note="Description of Artificial Sequence: Synthetic Linker"
CYVCEKW

SEQ ID NO: 4196 - protein, 7 aa, Artificial Sequence
  source: /note="Description of Artificial Sequence: Synthetic Linker"
RDQNGNI

SEQ ID NO: 4197 - protein, 8 aa, Artificial Sequence
  source: /note="Description of Artificial Sequence: Synthetic Linker"
RDKDKNFK

SEQ ID NO: 4198 - protein, 8 aa, Artificial Sequence
  source: /note="Description of Artificial Sequence: Synthetic Linker"
TAGNEDTK

SEQ ID NO: 4199 - protein, 9 aa, Artificial Sequence
  source: /note="Description of Artificial Sequence: Synthetic Linker"
ESNGRYSAL

SEQ ID NO: 4200 - protein, 11 aa, Artificial Sequence
  source: /note="Description of Artificial Sequence: Synthetic Linker"
GSHKSDALFGK

SEQ ID NO: 4201 - protein, 18 aa, Artificial Sequence
  source: /note="Description of Artificial Sequence: Synthetic Linker"
SKRKPSGGKPGTYNVWNF

SEQ ID NO: 4202 - protein, 4 aa, Artificial Sequence
  source: /note="Description of Artificial Sequence: Synthetic Linker"
FYNM

SEQ ID NO: 4203 - protein, 4 aa, Artificial Sequence
  source: /note="Description of Artificial Sequence: Synthetic Linker"
KFTW

SEQ ID NO: 4204 - protein, 6 aa, Artificial Sequence
  source: /note="Description of Artificial Sequence: Synthetic Linker"
FITPII

SEQ ID NO: 4205 - protein, 6 aa, Artificial Sequence
  source: /note="Description of Artificial Sequence: Synthetic Linker"
FSKKKA

SEQ ID NO: 4206 - protein, 7 aa, Artificial Sequence
  source: /note="Description of Artificial Sequence: Synthetic Linker"
SNLDRHL

SEQ ID NO: 4207 - protein, 8 aa, Artificial Sequence
  source: /note="Description of Artificial Sequence: Synthetic Linker"
FHSLQGND

SEQ ID NO: 4208 - protein, 8 aa, Artificial Sequence
  source: /note="Description of Artificial Sequence: Synthetic Linker"
ITKPTKNT

SEQ ID NO: 4209 - protein, 10 aa, Artificial Sequence
  source: /note="Description of Artificial Sequence: Synthetic Linker"
YYKGLGTSLA

SEQ ID NO: 4210 - protein, 14 aa, Artificial Sequence
  source: /note="Description of Artificial Sequence: Synthetic Linker"
QYEPGTVLDPTLKE

SEQ ID NO: 4211 - protein, 6 aa, Artificial Sequence
  source: /note="Description of Artificial Sequence: Synthetic Linker"
LNPSSR

SEQ ID NO: 4212 - protein, 8 aa, Artificial Sequence
  source: /note="Description of Artificial Sequence: Synthetic Linker"
QRAPPKTF

SEQ ID NO: 4213 - protein, 12 aa, Artificial Sequence
  source: /note="Description of Artificial Sequence: Synthetic Linker"
ADAKVMKDAKTK

SEQ ID NO: 4214 - protein, 4 aa, Artificial Sequence
  source: /note="Description of Artificial Sequence: Synthetic Linker"
LNGN

SEQ ID NO: 4215 - protein, 5 aa, Artificial Sequence
  source: /note="Description of Artificial Sequence: Synthetic Linker"
AGEME

SEQ ID NO: 4216 - protein, 6 aa, Artificial Sequence
  source: /note="Description of Artificial Sequence: Synthetic Linker"
MDNMGR

SEQ ID NO: 4217 - protein, 6 aa, Artificial Sequence
  source: /note="Description of Artificial Sequence: Synthetic Linker"
SREYKK

SEQ ID NO: 4218 - protein, 6 aa, Artificial Sequence
  source: /note="Description of Artificial Sequence: Synthetic Linker"
STKDVK

SEQ ID NO: 4219 - protein, 7 aa, Artificial Sequence
  source: /note="Description of Artificial Sequence: Synthetic Linker"
KLPVKGF

SEQ ID NO: 4220 - protein, 7 aa, Artificial Sequence
  source: /note="Description of Artificial Sequence: Synthetic Linker"
PFNGEDY

SEQ ID NO: 4221 - protein, 8 aa, Artificial Sequence
  source: /note="Description of Artificial Sequence: Synthetic Linker"
FKMQSLDK

SEQ ID NO: 4222 - protein, 4 aa, Artificial Sequence
  source: /note="Description of Artificial Sequence: Synthetic Linker"
TPEG

SEQ ID NO: 4223 - protein, 5 aa, Artificial Sequence
  source: /note="Description of Artificial Sequence: Synthetic Linker"
VGPLK

SEQ ID NO: 4224 - protein, 6 aa, Artificial Sequence
  source: /note="Description of Artificial Sequence: Synthetic Linker"
ETDADF

SEQ ID NO: 4225 - protein, 8 aa, Artificial Sequence
  source: /note="Description of Artificial Sequence: Synthetic Linker"
IPEEDGSS

SEQ ID NO: 4226 - protein, 9 aa, Artificial Sequence
  source: /note="Description of Artificial Sequence: Synthetic Linker"
DCTKLGTGA

SEQ ID NO: 4227 - protein, 10 aa, Artificial Sequence
  source: /note="Description of Artificial Sequence: Synthetic Linker"
NIPNDVTKLN

SEQ ID NO: 4228 - protein, 15 aa, Artificial Sequence
  source: /note="Description of Artificial Sequence: Synthetic Linker"
GAARPGLRLPGCVDA

SEQ ID NO: 4229 - protein, 12 aa, Artificial Sequence
  source: /note="Description of Artificial Sequence: Synthetic Linker"
RLRRNDDEPAEM

SEQ ID NO: 4230 - protein, 4 aa, Artificial Sequence
  source: /note="Description of Artificial Sequence: Synthetic Linker"
LDQR

SEQ ID NO: 4231 - protein, 5 aa, Artificial Sequence
  source: /note="Description of Artificial Sequence: Synthetic Linker"
VDGNR

SEQ ID NO: 4232 - protein, 6 aa, Artificial Sequence
  source: /note="Description of Artificial Sequence: Synthetic Linker"
PLRRFY

SEQ ID NO: 4233 - protein, 6 aa, Artificial Sequence
  source: /note="Description of Artificial Sequence: Synthetic Linker"
YAEEDG

SEQ ID NO: 4234 - protein, 6 aa, Artificial Sequence
  source: /note="Description of Artificial Sequence: Synthetic Linker"
YEDGRL

SEQ ID NO: 4235 - protein, 7 aa, Artificial Sequence
  source: /note="Description of Artificial Sequence: Synthetic Linker"
RSNQGTA

SEQ ID NO: 4236 - protein, 10 aa, Artificial Sequence
  source: /note="Description of Artificial Sequence: Synthetic Linker"
DGPASENGFL

SEQ ID NO: 4237 - protein, 14 aa, Artificial Sequence
  source: /note="Description of Artificial Sequence: Synthetic Linker"
PRVVVGQRVRKGDL

SEQ ID NO: 4238 - protein, 16 aa, Artificial Sequence
  source: /note="Description of Artificial Sequence: Synthetic Linker"
ELITNIGETAGVVQDI

SEQ ID NO: 4239 - protein, 20 aa, Artificial Sequence
  source: /note="Description of Artificial Sequence: Synthetic Linker"
SDPTLPRSDRECPKCHSREN

SEQ ID NO: 4240 - protein, 5 aa, Artificial Sequence
  source: /note="Description of Artificial Sequence: Synthetic Linker"
VEGEV

SEQ ID NO: 4241 - protein, 8 aa, Artificial Sequence
  source: /note="Description of Artificial Sequence: Synthetic Linker"
YVPVVQEV

SEQ ID NO: 4242 - protein, 4 aa, Artificial Sequence
  source: /note="Description of Artificial Sequence: Synthetic Linker"
YQNN

SEQ ID NO: 4243 - protein, 5 aa, Artificial Sequence
  source: /note="Description of Artificial Sequence: Synthetic Linker"
LVVNI

SEQ ID NO: 4244 - protein, 6 aa, Artificial Sequence
  source: /note="Description of Artificial Sequence: Synthetic Linker"
EKNFQT

SEQ ID NO: 4245 - protein, 11 aa, Artificial Sequence
  source: /note="Description of Artificial Sequence: Synthetic Linker"
MKLVPSIPPAT

SEQ ID NO: 4246 - protein, 14 aa, Artificial Sequence
  source: /note="Description of Artificial Sequence: Synthetic Linker"
TQPDVPFKNPDNVV

SEQ ID NO: 4247 - protein, 32 aa, Artificial Sequence
  source: /note="Description of Artificial Sequence: Synthetic Linker"
YPEDHNEPQSVRAASSDPGEVVPSACAADEPV

SEQ ID NO: 4248 - protein, 4 aa, Artificial Sequence
  source: /note="Description of Artificial Sequence: Synthetic Linker"
ALCL

SEQ ID NO: 4249 - protein, 4 aa, Artificial Sequence
  source: /note="Description of Artificial Sequence: Synthetic Linker"
LLSL

SEQ ID NO: 4250 - protein, 7 aa, Artificial Sequence
  source: /note="Description of Artificial Sequence: Synthetic Linker"
LNNVRFS

SEQ ID NO: 4251 - protein, 7 aa, Artificial Sequence
  source: /note="Description of Artificial Sequence: Synthetic Linker"
SLCKAHL

SEQ ID NO: 4252 - protein, 8 aa, Artificial Sequence
  source: /note="Description of Artificial Sequence: Synthetic Linker"
EHNNLVNV

SEQ ID NO: 4253 - protein, 8 aa, Artificial Sequence
  source: /note="Description of Artificial Sequence: Synthetic Linker"
YDTGRTGR

SEQ ID NO: 4254 - protein, 11 aa, Artificial Sequence
  source: /note="Description of Artificial Sequence: Synthetic Linker"
QHNLKQNDQPQ

SEQ ID NO: 4255 - protein, 11 aa, Artificial Sequence
  source: /note="Description of Artificial Sequence: Synthetic Linker"
LYPNAQTGHGH

SEQ ID NO: 4256 - protein, 13 aa, Artificial Sequence
  source: /note="Description of Artificial Sequence: Synthetic Linker"
AEVTYKHHEPTGC

SEQ ID NO: 4257 - protein, 4 aa, Artificial Sequence
  source: /note="Description of Artificial Sequence: Synthetic Linker"
MITP

SEQ ID NO: 4258 - protein, 8 aa, Artificial Sequence
  source: /note="Description of Artificial Sequence: Synthetic Linker"
LQHPKIIK

SEQ ID NO: 4259 - protein, 12 aa, Artificial Sequence
  source: /note="Description of Artificial Sequence: Synthetic Linker"
REDEEMGLTTTS

SEQ ID NO: 4260 - protein, 5 aa, Artificial Sequence
  source: /note="Description of Artificial Sequence: Synthetic Linker"
GSREE

SEQ ID NO: 4261 - protein, 4 aa, Artificial Sequence
  source: /note="Description of Artificial Sequence: Synthetic Linker"
ENTC

SEQ ID NO: 4262 - protein, 11 aa, Artificial Sequence
  source: /note="Description of Artificial Sequence: Synthetic Linker"
PVSGAKTFKNE

SEQ ID NO: 4263 - protein, 5 aa, Artificial Sequence
  source: /note="Description of Artificial Sequence: Synthetic Linker"
LSQDD

SEQ ID NO: 4264 - protein, 8 aa, Artificial Sequence
  source: /note="Description of Artificial Sequence: Synthetic Linker"
LLGADDDL

SEQ ID NO: 4265 - protein, 4 aa, Artificial Sequence
  source: /note="Description of Artificial Sequence: Synthetic Linker"
GHGE

SEQ ID NO: 4266 - protein, 4 aa, Artificial Sequence
  source: /note="Description of Artificial Sequence: Synthetic Linker"
PKGR

SEQ ID NO: 4267 - protein, 5 aa, Artificial Sequence
  source: /note="Description of Artificial Sequence: Synthetic Linker"
ALPSP

SEQ ID NO: 4268 - protein, 6 aa, Artificial Sequence
  source: /note="Description of Artificial Sequence: Synthetic Linker"
DYGVEV

SEQ ID NO: 4269 - protein, 6 aa, Artificial Sequence
  source: /note="Description of Artificial Sequence: Synthetic Linker"
EDPSLK

SEQ ID NO: 4270 - protein, 7 aa, Artificial Sequence
  source: /note="Description of Artificial Sequence: Synthetic Linker"
FGDGPPL

SEQ ID NO: 4271 - protein, 8 aa, Artificial Sequence
  source: /note="Description of Artificial Sequence: Synthetic Linker"
RQEETGEL

SEQ ID NO: 4272 - protein, 8 aa, Artificial Sequence
  source: /note="Description of Artificial Sequence: Synthetic Linker"
SVPKVPYR

SEQ ID NO: 4273 - protein, 8 aa, Artificial Sequence
  source: /note="Description of Artificial Sequence: Synthetic Linker"
WQGEKPES

SEQ ID NO: 4274 - protein, 12 aa, Artificial Sequence
  source: /note="Description of Artificial Sequence: Synthetic Linker"
EVPFARLPDPNV

SEQ ID NO: 4275 - protein, 4 aa, Artificial Sequence
  source: /note="Description of Artificial Sequence: Synthetic Linker"
DIYV

SEQ ID NO: 4276 - protein, 6 aa, Artificial Sequence
  source: /note="Description of Artificial Sequence: Synthetic Linker"
IGENIN

SEQ ID NO: 4277 - protein, 7 aa, Artificial Sequence
  source: /note="Description of Artificial Sequence: Synthetic Linker"
AGKITDV

SEQ ID NO: 4278 - protein, 8 aa, Artificial Sequence
  source: /note="Description of Artificial Sequence: Synthetic Linker"
KAGNVAAD

SEQ ID NO: 4279 - protein, 14 aa, Artificial Sequence
  source: /note="Description of Artificial Sequence: Synthetic Linker"
YIPVPTRDLEKPFL

SEQ ID NO: 4280 - protein, 4 aa, Artificial Sequence
  source: /note="Description of Artificial Sequence: Synthetic Linker"
GEHI

SEQ ID NO: 4281 - protein, 4 aa, Artificial Sequence
  source: /note="Description of Artificial Sequence: Synthetic Linker"
EGPE

SEQ ID NO: 4282 - protein, 4 aa, Artificial Sequence
  source: /note="Description of Artificial Sequence: Synthetic Linker"
FEWT

SEQ ID NO: 4283 - protein, 4 aa, Artificial Sequence
  source: /note="Description of Artificial Sequence: Synthetic Linker"
KATY

SEQ ID NO: 4284 - protein, 4 aa, Artificial Sequence
  source: /note="Description of Artificial Sequence: Synthetic Linker"
KDGV

SEQ ID NO: 4285 - protein, 4 aa, Artificial Sequence
  source: /note="Description of Artificial Sequence: Synthetic Linker"
LLGS

SEQ ID NO: 4286 - protein, 4 aa, Artificial Sequence
  source: /note="Description of Artificial Sequence: Synthetic Linker"
VSKS

SEQ ID NO: 4287 - protein, 7 aa, Artificial Sequence
  source: /note="Description of Artificial Sequence: Synthetic Linker"
KAPDGRI

SEQ ID NO: 4288 - protein, 8 aa, Artificial Sequence
  source: /note="Description of Artificial Sequence: Synthetic Linker"
RKASNKAY

SEQ ID NO: 4289 - protein, 10 aa, Artificial Sequence
  source: /note="Description of Artificial Sequence: Synthetic Linker"
YAPILYENDH

SEQ ID NO: 4290 - protein, 4 aa, Artificial Sequence
  source: /note="Description of Artificial Sequence: Synthetic Linker"
YSLG

SEQ ID NO: 4291 - protein, 6 aa, Artificial Sequence
  source: /note="Description of Artificial Sequence: Synthetic Linker"
LDPQWS

SEQ ID NO: 4292 - protein, 7 aa, Artificial Sequence
  source: /note="Description of Artificial Sequence: Synthetic Linker"
REGNGPT

SEQ ID NO: 4293 - protein, 7 aa, Artificial Sequence
  source: /note="Description of Artificial Sequence: Synthetic Linker"
RGEQVAF

SEQ ID NO: 4294 - protein, 8 aa, Artificial Sequence
  source: /note="Description of Artificial Sequence: Synthetic Linker"
QQPHGPYY

SEQ ID NO: 4295 - protein, 11 aa, Artificial Sequence
  source: /note="Description of Artificial Sequence: Synthetic Linker"
LDTWPPETQNW

SEQ ID NO: 4296 - protein, 13 aa, Artificial Sequence
  source: /note="Description of Artificial Sequence: Synthetic Linker"
CFHPASGFAWQFS

SEQ ID NO: 4297 - protein, 16 aa, Artificial Sequence
  source: /note="Description of Artificial Sequence: Synthetic Linker"
GIQSPRPNGPMQTAAN

SEQ ID NO: 4298 - protein, 17 aa, Artificial Sequence
  source: /note="Description of Artificial Sequence: Synthetic Linker"
IDAEEDSTRRMGFETIL

SEQ ID NO: 4299 - protein, 22 aa, Artificial Sequence
  source: /note="Description of Artificial Sequence: Synthetic Linker"
EMPDAPLQPGWDRPETPYSPPL

SEQ ID NO: 4300 - protein, 6 aa, Artificial Sequence
  source: /note="Description of Artificial Sequence: Synthetic Linker"
LLDAPV

SEQ ID NO: 4301 - protein, 5 aa, Artificial Sequence
  source: /note="Description of Artificial Sequence: Synthetic Linker"
EHIDL

SEQ ID NO: 4302 - protein, 5 aa, Artificial Sequence
  source: /note="Description of Artificial Sequence: Synthetic Linker"
FGCDK

SEQ ID NO: 4303 - protein, 7 aa, Artificial Sequence
  source: /note="Description of Artificial Sequence: Synthetic Linker"
CDCKHTT

SEQ ID NO: 4304 - protein, 9 aa, Artificial Sequence
  source: /note="Description of Artificial Sequence: Synthetic Linker"
LNGNDNTIK

SEQ ID NO: 4305 - protein, 10 aa, Artificial Sequence
  source: /note="Description of Artificial Sequence: Synthetic Linker"
ISENKNDAKV

SEQ ID NO: 4306 - protein, 8 aa, Artificial Sequence
  source: /note="Description of Artificial Sequence: Synthetic Linker"
TAACTNTS

SEQ ID NO: 4307 - protein, 4 aa, Artificial Sequence
  source: /note="Description of Artificial Sequence: Synthetic Linker"
LTLL

SEQ ID NO: 4308 - protein, 12 aa, Artificial Sequence
  source: /note="Description of Artificial Sequence: Synthetic Linker"
DWENWQNVGQWR

SEQ ID NO: 4309 - protein, 8 aa, Artificial Sequence
  source: /note="Description of Artificial Sequence: Synthetic Linker"
STKNPVHA

SEQ ID NO: 4310 - protein, 5 aa, Artificial Sequence
  source: /note="Description of Artificial Sequence: Synthetic Linker"
THRNK

SEQ ID NO: 4311 - protein, 12 aa, Artificial Sequence
  source: /note="Description of Artificial Sequence: Synthetic Linker"
IDHVLGVPYTTV

SEQ ID NO: 4312 - protein, 4 aa, Artificial Sequence
  source: /note="Description of Artificial Sequence: Synthetic Linker"
IDGR

SEQ ID NO: 4313 - protein, 4 aa, Artificial Sequence
  source: /note="Description of Artificial Sequence: Synthetic Linker"
KGTQ

SEQ ID NO: 4314 - protein, 5 aa, Artificial Sequence
  source: /note="Description of Artificial Sequence: Synthetic Linker"
ETIKG

SEQ ID NO: 4315 - protein, 6 aa, Artificial Sequence
  source: /note="Description of Artificial Sequence: Synthetic Linker"
ECSSES

SEQ ID NO: 4316 - protein, 7 aa, Artificial Sequence
  source: /note="Description of Artificial Sequence: Synthetic Linker"
LDPTKTI

SEQ ID NO: 4317 - protein, 8 aa, Artificial Sequence
  source: /note="Description of Artificial Sequence: Synthetic Linker"
SKPEAEET

SEQ ID NO: 4318 - protein, 10 aa, Artificial Sequence
  source: /note="Description of Artificial Sequence: Synthetic Linker"
ETAVTQTYGG

SEQ ID NO: 4319 - protein, 11 aa, Artificial Sequence
  source: /note="Description of Artificial Sequence: Synthetic Linker"
FCTDHTVLVQT

SEQ ID NO: 4320 - protein, 4 aa, Artificial Sequence
  source: /note="Description of Artificial Sequence: Synthetic Linker"
SGGT

SEQ ID NO: 4321 - protein, 6 aa, Artificial Sequence
  source: /note="Description of Artificial Sequence: Synthetic Linker"
FNENGI

SEQ ID NO: 4322 - protein, 6 aa, Artificial Sequence
  source: /note="Description of Artificial Sequence: Synthetic Linker"
SFLNSM

SEQ ID NO: 4323 - protein, 7 aa, Artificial Sequence
  source: /note="Description of Artificial Sequence: Synthetic Linker"
QNTGANN

SEQ ID NO: 4324 - protein, 9 aa, Artificial Sequence
  source: /note="Description of Artificial Sequence: Synthetic Linker"
QNGYKPGDL

SEQ ID NO: 4325 - protein, 12 aa, Artificial Sequence
  source: /note="Description of Artificial Sequence: Synthetic Linker"
TTGTINGATAAT

SEQ ID NO: 4326 - protein, 15 aa, Artificial Sequence
  source: /note="Description of Artificial Sequence: Synthetic Linker"
DSSDPAATAPTTAST

SEQ ID NO: 4327 - protein, 11 aa, Artificial Sequence
  source: /note="Description of Artificial Sequence: Synthetic Linker"
AEQPGGWKGWR

SEQ ID NO: 4328 - protein, 7 aa, Artificial Sequence
  source: /note="Description of Artificial Sequence: Synthetic Linker"
VYRFDKE

SEQ ID NO: 4329 - protein, 4 aa, Artificial Sequence
  source: /note="Description of Artificial Sequence: Synthetic Linker"
DAHG

SEQ ID NO: 4330 - protein, 4 aa, Artificial Sequence
  source: /note="Description of Artificial Sequence: Synthetic Linker"
KGAL

SEQ ID NO: 4331 - protein, 5 aa, Artificial Sequence
  source: /note="Description of Artificial Sequence: Synthetic Linker"
RGVEW

SEQ ID NO: 4332 - protein, 6 aa, Artificial Sequence
  source: /note="Description of Artificial Sequence: Synthetic Linker"
VTDHDW

SEQ ID NO: 4333 - protein, 7 aa, Artificial Sequence
  source: /note="Description of Artificial Sequence: Synthetic Linker"
SGLEVSE

SEQ ID NO: 4334 - protein, 8 aa, Artificial Sequence
  source: /note="Description of Artificial Sequence: Synthetic Linker"
LPLPLVPQ

SEQ ID NO: 4335 - protein, 8 aa, Artificial Sequence
  source: /note="Description of Artificial Sequence: Synthetic Linker"
VGEPEMPS

SEQ ID NO: 4336 - protein, 9 aa, Artificial Sequence
  source: /note="Description of Artificial Sequence: Synthetic Linker"
SAILPGRFQ

SEQ ID NO: 4337 - protein, 18 aa, Artificial Sequence
  source: /note="Description of Artificial Sequence: Synthetic Linker"
QGKCKKTCRDVFCPGSST

SEQ ID NO: 4338 - protein, 4 aa, Artificial Sequence
  source: /note="Description of Artificial Sequence: Synthetic Linker"
EEGL

SEQ ID NO: 4339 - protein, 4 aa, Artificial Sequence
  source: /note="Description of Artificial Sequence: Synthetic Linker"
FAGY

SEQ ID NO: 4340 - protein, 6 aa, Artificial Sequence
  source: /note="Description of Artificial Sequence: Synthetic Linker"
NKETRK

SEQ ID NO: 4341 - protein, 7 aa, Artificial Sequence
  source: /note="Description of Artificial Sequence: Synthetic Linker"
EKELYFK

SEQ ID NO: 4342 - protein, 7 aa, Artificial Sequence
  source: /note="Description of Artificial Sequence: Synthetic Linker"
FQGKIKG

SEQ ID NO: 4343 - protein, 7 aa, Artificial Sequence
  source: /note="Description of Artificial Sequence: Synthetic Linker"
MWPDADL

SEQ ID NO: 4344 - protein, 7 aa, Artificial Sequence
  source: /note="Description of Artificial Sequence: Synthetic Linker"
VGEGFAF

SEQ ID NO: 4345 - protein, 10 aa, Artificial Sequence
  source: /note="Description of Artificial Sequence: Synthetic Linker"
GTARASIPTY

SEQ ID NO: 4346 - protein, 13 aa, Artificial Sequence
  source: /note="Description of Artificial Sequence: Synthetic Linker"
FTPVSKDPQSANW

SEQ ID NO: 4347 - protein, 13 aa, Artificial Sequence
  source: /note="Description of Artificial Sequence: Synthetic Linker"
YLPKGEDGKDYSW

SEQ ID NO: 4348 - protein, 22 aa, Artificial Sequence
  source: /note="Description of Artificial Sequence: Synthetic Linker"
WGFERDENGNPKRDETLKHPRC

SEQ ID NO: 4349 - protein, 55 aa, Artificial Sequence
  source: /note="Description of Artificial Sequence: Synthetic Linker"
AYLYGPGREDGPLPEYYEPMECPVIEHPFSKTLHNPTALHFATEEKAVCDPRYPF

SEQ ID NO: 4350 - protein, 44 aa, Artificial Sequence
  source: /note="Description of Artificial Sequence: Synthetic Linker"
GRLFAINKMAEGPFPEHYEPIETPLGTNPLHPNVVSNPVVRLYE

SEQ ID NO: 4351 - protein, 4 aa, Artificial Sequence
  source: /note="Description of Artificial Sequence: Synthetic Linker"
AAQK

SEQ ID NO: 4352 - protein, 4 aa, Artificial Sequence
  source: /note="Description of Artificial Sequence: Synthetic Linker"
EDGL

SEQ ID NO: 4353 - protein, 4 aa, Artificial Sequence
  source: /note="Description of Artificial Sequence: Synthetic Linker"
FSGY

SEQ ID NO: 4354 - protein, 5 aa, Artificial Sequence
  source: /note="Description of Artificial Sequence: Synthetic Linker"
TNASL

SEQ ID NO: 4355 - protein, 6 aa, Artificial Sequence
  source: /note="Description of Artificial Sequence: Synthetic Linker"
DAEKRQ

SEQ ID NO: 4356 - protein, 7 aa, Artificial Sequence
  source: /note="Description of Artificial Sequence: Synthetic Linker"
DEGKVTG

SEQ ID NO: 4357 - protein, 7 aa, Artificial Sequence
  source: /note="Description of Artificial Sequence: Synthetic Linker"
ENNKINA

SEQ ID NO: 4358 - protein, 7 aa, Artificial Sequence
  source: /note="Description of Artificial Sequence: Synthetic Linker"
VRDDFAF

SEQ ID NO: 4359 - protein, 10 aa, Artificial Sequence
  source: /note="Description of Artificial Sequence: Synthetic Linker"
TLPSEKQVDL

SEQ ID NO: 4360 - protein, 11 aa, Artificial Sequence
  source: /note="Description of Artificial Sequence: Synthetic Linker"
WLPKWDQTYDV

SEQ ID NO: 4361 - protein, 12 aa, Artificial Sequence
  source: /note="Description of Artificial Sequence: Synthetic Linker"
ALRMGKKEQFPY

SEQ ID NO: 4362 - protein, 13 aa, Artificial Sequence
  source: /note="Description of Artificial Sequence: Synthetic Linker"
NTPKATLADQVNY

SEQ ID NO: 4363 - protein, 27 aa, Artificial Sequence
  source: /note="Description of Artificial Sequence: Synthetic Linker"
YDKSSWNYQLDENGYAKRDETLTHPRC

SEQ ID NO: 4364 - protein, 9 aa, Artificial Sequence
  source: /note="Description of Artificial Sequence: Synthetic Linker"
HLPATIGDY

SEQ ID NO: 4365 - protein, 4 aa, Artificial Sequence
  source: /note="Description of Artificial Sequence: Synthetic Linker"
SNRG

SEQ ID NO: 4366 - protein, 6 aa, Artificial Sequence
  source: /note="Description of Artificial Sequence: Synthetic Linker"
DAVKGK

SEQ ID NO: 4367 - protein, 7 aa, Artificial Sequence
  source: /note="Description of Artificial Sequence: Synthetic Linker"
LLPDGRV

SEQ ID NO: 4368 - protein, 7 aa, Artificial Sequence
  source: /note="Description of Artificial Sequence: Synthetic Linker"
MDGNGQI

SEQ ID NO: 4369 - protein, 7 aa, Artificial Sequence
  source: /note="Description of Artificial Sequence: Synthetic Linker"
QAGPSTA

SEQ ID NO: 4370 - protein, 7 aa, Artificial Sequence
  source: /note="Description of Artificial Sequence: Synthetic Linker"
SDNHAWL

SEQ ID NO: 4371 - protein, 7 aa, Artificial Sequence
  source: /note="Description of Artificial Sequence: Synthetic Linker"
VLPDGST

SEQ ID NO: 4372 - protein, 7 aa, Artificial Sequence
  source: /note="Description of Artificial Sequence: Synthetic Linker"
YNSNGNL

SEQ ID NO: 4373 - protein, 7 aa, Artificial Sequence
  source: /note="Description of Artificial Sequence: Synthetic Linker"
YTSGSGD

SEQ ID NO: 4374 - protein, 8 aa, Artificial Sequence
  source: /note="Description of Artificial Sequence: Synthetic Linker"
DLPIVPAA

SEQ ID NO: 4375 - protein, 8 aa, Artificial Sequence
  source: /note="Description of Artificial Sequence: Synthetic Linker"
IEPTSGRV

SEQ ID NO: 4376 - protein, 8 aa, Artificial Sequence
  source: /note="Description of Artificial Sequence: Synthetic Linker"
WDPSTGIV

SEQ ID NO: 4377 - protein, 9 aa, Artificial Sequence
  source: /note="Description of Artificial Sequence: Synthetic Linker"
EANGQPWTS

SEQ ID NO: 4378 - protein, 9 aa, Artificial Sequence
  source: /note="Description of Artificial Sequence: Synthetic Linker"
MLTADKQGL

SEQ ID NO: 4379 - protein, 9 aa, Artificial Sequence
  source: /note="Description of Artificial Sequence: Synthetic Linker"
VAPDAMCGN

SEQ ID NO: 4380 - protein, 10 aa, Artificial Sequence
  source: /note="Description of Artificial Sequence: Synthetic Linker"
TLGEPGTSPN

SEQ ID NO: 4381 - protein, 12 aa, Artificial Sequence
  source: /note="Description of Artificial Sequence: Synthetic Linker"
VTVTKHDMFCPG

SEQ ID NO: 4382 - protein, 13 aa, Artificial Sequence
  source: /note="Description of Artificial Sequence: Synthetic Linker"
KQNPNSIVRVYHS

SEQ ID NO: 4383 - protein, 14 aa, Artificial Sequence
  source: /note="Description of Artificial Sequence: Synthetic Linker"
FASNGLYFARTFHT

SEQ ID NO: 4384 - protein, 14 aa, Artificial Sequence
  source: /note="Description of Artificial Sequence: Synthetic Linker"
GGGLCGDCTTNHFD

SEQ ID NO: 4385 - protein, 14 aa, Artificial Sequence
  source: /note="Description of Artificial Sequence: Synthetic Linker"
QASSYTAPQPGLGR

SEQ ID NO: 4386 - protein, 16 aa, Artificial Sequence
  source: /note="Description of Artificial Sequence: Synthetic Linker"
FGGSPDYQDSDATTNA

SEQ ID NO: 4387 - protein, 17 aa, Artificial Sequence
  source: /note="Description of Artificial Sequence: Synthetic Linker"
WSSYRNDAFGGSPGGIT

SEQ ID NO: 4388 - protein, 20 aa, Artificial Sequence
  source: /note="Description of Artificial Sequence: Synthetic Linker"
TGGQRRGIPFEDSTPVFTPE

SEQ ID NO: 4389 - protein, 10 aa, Artificial Sequence
  source: /note="Description of Artificial Sequence: Synthetic Linker"
LIPQHTGTFR

SEQ ID NO: 4390 - protein, 11 aa, Artificial Sequence
  source: /note="Description of Artificial Sequence: Synthetic Linker"
EPRSQPHTKPS

SEQ ID NO: 4391 - protein, 4 aa, Artificial Sequence
  source: /note="Description of Artificial Sequence: Synthetic Linker"
KPAP

SEQ ID NO: 4392 - protein, 6 aa, Artificial Sequence
  source: /note="Description of Artificial Sequence: Synthetic Linker"
IEGANG

SEQ ID NO: 4393 - protein, 8 aa, Artificial Sequence
  source: /note="Description of Artificial Sequence: Synthetic Linker"
PIKNMPID

SEQ ID NO: 4394 - protein, 12 aa, Artificial Sequence
  source: /note="Description of Artificial Sequence: Synthetic Linker"
DQPTAHPTVRDE

SEQ ID NO: 4395 - protein, 8 aa, Artificial Sequence
  source: /note="Description of Artificial Sequence: Synthetic Linker"
LVRTLVPT

SEQ ID NO: 4396 - protein, 9 aa, Artificial Sequence
  source: /note="Description of Artificial Sequence: Synthetic Linker"
AGAPVETPQ

SEQ ID NO: 4397 - protein, 11 aa, Artificial Sequence
  source: /note="Description of Artificial Sequence: Synthetic Linker"
SLDAPATSLTG

SEQ ID NO: 4398 - protein, 12 aa, Artificial Sequence
  source: /note="Description of Artificial Sequence: Synthetic Linker"
YAAGTPLSSPEL

SEQ ID NO: 4399 - protein, 4 aa, Artificial Sequence
  source: /note="Description of Artificial Sequence: Synthetic Linker"
KVEH

SEQ ID NO: 4400 - protein, 4 aa, Artificial Sequence
  source: /note="Description of Artificial Sequence: Synthetic Linker"
SHGQ

SEQ ID NO: 4401 - protein, 4 aa, Artificial Sequence
  source: /note="Description of Artificial Sequence: Synthetic Linker"
VDLS

SEQ ID NO: 4402 - protein, 5 aa, Artificial Sequence
  source: /note="Description of Artificial Sequence: Synthetic Linker"
KGLDA

SEQ ID NO: 4403 - protein, 5 aa, Artificial Sequence
  source: /note="Description of Artificial Sequence: Synthetic Linker"
LGPNA

SEQ ID NO: 4404 - protein, 5 aa, Artificial Sequence
  source: /note="Description of Artificial Sequence: Synthetic Linker"
LTGRI

SEQ ID NO: 4405 - protein, 6 aa, Artificial Sequence
  source: /note="Description of Artificial Sequence: Synthetic Linker"
ITRRSV

SEQ ID NO: 4406 - protein, 6 aa, Artificial Sequence
  source: /note="Description of Artificial Sequence: Synthetic Linker"
VKRQDI

SEQ ID NO: 4407 - protein, 7 aa, Artificial Sequence
  source: /note="Description of Artificial Sequence: Synthetic Linker"
FDKTGAE

SEQ ID NO: 4408 - protein, 17 aa, Artificial Sequence
  source: /note="Description of Artificial Sequence: Synthetic Linker"
ESNLQYDAGDKGIYRHY

SEQ ID NO: 4409 - protein, 5 aa, Artificial Sequence
  source: /note="Description of Artificial Sequence: Synthetic Linker"
DIGTI

SEQ ID NO: 4410 - protein, 27 aa, Artificial Sequence
  source: /note="Description of Artificial Sequence: Synthetic Linker"
TKKPVPDFSFYDRSAPIYTQPRYLPPS

SEQ ID NO: 4411 - protein, 4 aa, Artificial Sequence
  source: /note="Description of Artificial Sequence: Synthetic Linker"
KTPL

SEQ ID NO: 4412 - protein, 7 aa, Artificial Sequence
  source: /note="Description of Artificial Sequence: Synthetic Linker"
NCYGCET

SEQ ID NO: 4413 - protein, 16 aa, Artificial Sequence
  source: /note="Description of Artificial Sequence: Synthetic Linker"
YGIDVKIPEGLEPPNE

SEQ ID NO: 4414 - protein, 6 aa, Artificial Sequence
  source: /note="Description of Artificial Sequence: Synthetic Linker"
VGGFYN

SEQ ID NO: 4415 - protein, 7 aa, Artificial Sequence
  source: /note="Description of Artificial Sequence: Synthetic Linker"
VLTGKAR

SEQ ID NO: 4416 - protein, 14 aa, Artificial Sequence
  source: /note="Description of Artificial Sequence: Synthetic Linker"
FDVAESVIPSSGTF

SEQ ID NO: 4417 - protein, 5 aa, Artificial Sequence
  source: /note="Description of Artificial Sequence: Synthetic Linker"
TLKPW

SEQ ID NO: 4418 - protein, 9 aa, Artificial Sequence
  source: /note="Description of Artificial Sequence: Synthetic Linker"
VQNTTHLDE

SEQ ID NO: 4419 - protein, 11 aa, Artificial Sequence
  source: /note="Description of Artificial Sequence: Synthetic Linker"
LKGEPSDMDKA

SEQ ID NO: 4420 - protein, 14 aa, Artificial Sequence
  source: /note="Description of Artificial Sequence: Synthetic Linker"
HFPAMVSRISGIGL

SEQ ID NO: 4421 - protein, 15 aa, Artificial Sequence
  source: /note="Description of Artificial Sequence: Synthetic Linker"
QVSRGAEHLDDLDLN

SEQ ID NO: 4422 - protein, 26 aa, Artificial Sequence
  source: /note="Description of Artificial Sequence: Synthetic Linker"
LAQVDPGENARYCTLQGRNEVPDTLD

SEQ ID NO: 4423 - protein, 27 aa, Artificial Sequence
  source: /note="Description of Artificial Sequence: Synthetic Linker"
YNEEVVALPVGGFYRFRKSGDRHGWEG

SEQ ID NO: 4424 - protein, 13 aa, Artificial Sequence
  source: /note="Description of Artificial Sequence: Synthetic Linker"
HDPFTLEPYSRDP

SEQ ID NO: 4425 - protein, 13 aa, Artificial Sequence
  source: /note="Description of Artificial Sequence: Synthetic Linker"
YTPAGEPIPTNKR

SEQ ID NO: 4426 - protein, 4 aa, Artificial Sequence
  source: /note="Description of Artificial Sequence: Synthetic Linker"
NIPP

SEQ ID NO: 4427 - protein, 4 aa, Artificial Sequence
  source: /note="Description of Artificial Sequence: Synthetic Linker"
RGWA

SEQ ID NO: 4428 - protein, 5 aa, Artificial Sequence
  source: /note="Description of Artificial Sequence: Synthetic Linker"
AFETP

SEQ ID NO: 4429 - protein, 5 aa, Artificial Sequence
  source: /note="Description of Artificial Sequence: Synthetic Linker"
DELRG

SEQ ID NO: 4430 - protein, 6 aa, Artificial Sequence
  source: /note="Description of Artificial Sequence: Synthetic Linker"
EIPDVV

SEQ ID NO: 4431 - protein, 7 aa, Artificial Sequence
  source: /note="Description of Artificial Sequence: Synthetic Linker"
KGGYDGR

SEQ ID NO: 4432 - protein, 7 aa, Artificial Sequence
  source: /note="Description of Artificial Sequence: Synthetic Linker"
RRGEPHV

SEQ ID NO: 4433 - protein, 8 aa, Artificial Sequence
  source: /note="Description of Artificial Sequence: Synthetic Linker"
LKVPRPGT

SEQ ID NO: 4434 - protein, 14 aa, Artificial Sequence
  source: /note="Description of Artificial Sequence: Synthetic Linker"
NLDGKPLLTGKRNP

SEQ ID NO: 4435 - protein, 6 aa, Artificial Sequence
  source: /note="Description of Artificial Sequence: Synthetic Linker"
DHSDVA

SEQ ID NO: 4436 - protein, 8 aa, Artificial Sequence
  source: /note="Description of Artificial Sequence: Synthetic Linker"
FKPAYGSI

SEQ ID NO: 4437 - protein, 19 aa, Artificial Sequence
  source: /note="Description of Artificial Sequence: Synthetic Linker"
AFPGTPHLLPPANSGDADA

SEQ ID NO: 4438 - protein, 12 aa, Artificial Sequence
  source: /note="Description of Artificial Sequence: Synthetic Linker"
YGKDDKLYPKDP

SEQ ID NO: 4439 - protein, 9 aa, Artificial Sequence
  source: /note="Description of Artificial Sequence: Synthetic Linker"
KYNLYGKDI

SEQ ID NO: 4440 - protein, 6 aa, Artificial Sequence
  source: /note="Description of Artificial Sequence: Synthetic Linker"
LREGNL

SEQ ID NO: 4441 - protein, 6 aa, Artificial Sequence
  source: /note="Description of Artificial Sequence: Synthetic Linker"
DCNEKL

SEQ ID NO: 4442 - protein, 6 aa, Artificial Sequence
  source: /note="Description of Artificial Sequence: Synthetic Linker"
LYPSDP

SEQ ID NO: 4443 - protein, 6 aa, Artificial Sequence
  source: /note="Description of Artificial Sequence: Synthetic Linker"
YGAHDA

SEQ ID NO: 4444 - protein, 9 aa, Artificial Sequence
  source: /note="Description of Artificial Sequence: Synthetic Linker"
QFKMMGETD

SEQ ID NO: 4445 - protein, 6 aa, Artificial Sequence
  source: /note="Description of Artificial Sequence: Synthetic Linker"
FETEYF

SEQ ID NO: 4446 - protein, 11 aa, Artificial Sequence
  source: /note="Description of Artificial Sequence: Synthetic Linker"
TSPHDHQTHAY

SEQ ID NO: 4447 - protein, 9 aa, Artificial Sequence
  source: /note="Description of Artificial Sequence: Synthetic Linker"
KADPKGITE

SEQ ID NO: 4448 - protein, 34 aa, Artificial Sequence
  source: /note="Description of Artificial Sequence: Synthetic Linker"
LTAKEPTEVESVECPHIAVGVWEANEKLPETPDR

SEQ ID NO: 4449 - protein, 4 aa, Artificial Sequence
  source: /note="Description of Artificial Sequence: Synthetic Linker"
VVPN

SEQ ID NO: 4450 - protein, 5 aa, Artificial Sequence
  source: /note="Description of Artificial Sequence: Synthetic Linker"
LSPPV

SEQ ID NO: 4451 - protein, 7 aa, Artificial Sequence
  source: /note="Description of Artificial Sequence: Synthetic Linker"
DVKNGEC

SEQ ID NO: 4452 - protein, 7 aa, Artificial Sequence
  source: /note="Description of Artificial Sequence: Synthetic Linker"
KDDIVDR

SEQ ID NO: 4453 - protein, 7 aa, Artificial Sequence
  source: /note="Description of Artificial Sequence: Synthetic Linker"
SDKKCSV

SEQ ID NO: 4454 - protein, 7 aa, Artificial Sequence
  source: /note="Description of Artificial Sequence: Synthetic Linker"
TKVPLVA

SEQ ID NO: 4455 - protein, 9 aa, Artificial Sequence
  source: /note="Description of Artificial Sequence: Synthetic Linker"
LAQLDNYGQ

SEQ ID NO: 4456 - protein, 12 aa, Artificial Sequence
  source: /note="Description of Artificial Sequence: Synthetic Linker"
NYNVKSPITGND

SEQ ID NO: 4457 - protein, 85 aa, Artificial Sequence
  source: /note="Description of Artificial Sequence: Synthetic Linker"
KPLKEPKTVNVVQFEPSKGAIGKAYKKDAKLVMEYLAICDECYITEMEMLLNEKGEFTIETEGKTFQLTKDMINVKRFQKTLYVE

SEQ ID NO: 4458 - protein, 4 aa, Artificial Sequence
  source: /note="Description of Artificial Sequence: Synthetic Linker"
SNGG

SEQ ID NO: 4459 - protein, 13 aa, Artificial Sequence
  source: /note="Description of Artificial Sequence: Synthetic Linker"
FSVDEIVQPDPPI

SEQ ID NO: 4460 - protein, 10 aa, Artificial Sequence
  source: /note="Description of Artificial Sequence: Synthetic Linker"
LTPRRSRKLK

SEQ ID NO: 4461 - protein, 6 aa, Artificial Sequence
  source: /note="Description of Artificial Sequence: Synthetic Linker"
DEPRSV

SEQ ID NO: 4462 - protein, 29 aa, Artificial Sequence
  source: /note="Description of Artificial Sequence: Synthetic Linker"
LPTANGDGGALALDSLTVLGAGGNNANDW

SEQ ID NO: 4463 - protein, 6 aa, Artificial Sequence
  source: /note="Description of Artificial Sequence: Synthetic Linker"
RNNLTR

SEQ ID NO: 4464 - protein, 8 aa, Artificial Sequence
  source: /note="Description of Artificial Sequence: Synthetic Linker"
RAMTDVHQ

SEQ ID NO: 4465 - protein, 24 aa, Artificial Sequence
  source: /note="Description of Artificial Sequence: Synthetic Linker"
TTENPELQLEPLSAPEVTEPTATD

SEQ ID NO: 4466 - protein, 6 aa, Artificial Sequence
  source: /note="Description of Artificial Sequence: Synthetic Linker"
VPRDCG

SEQ ID NO: 4467 - protein, 7 aa, Artificial Sequence
  source: /note="Description of Artificial Sequence: Synthetic Linker"
VRSRGPE

SEQ ID NO: 4468 - protein, 40 aa, Artificial Sequence
  source: /note="Description of Artificial Sequence: Synthetic Linker"
QEPEFQRMSALRLAACKRKEQEHGKDRGNTPKKPRLVFTD

SEQ ID NO: 4469 - protein, 14 aa, Artificial Sequence
  source: /note="Description of Artificial Sequence: Synthetic Linker"
AEGFGLPEEKGPDL

SEQ ID NO: 4470 - protein, 4 aa, Artificial Sequence
  source: /note="Description of Artificial Sequence: Synthetic Linker"
KGGK

SEQ ID NO: 4471 - protein, 6 aa, Artificial Sequence
  source: /note="Description of Artificial Sequence: Synthetic Linker"
KNQKPI

SEQ ID NO: 4472 - protein, 7 aa, Artificial Sequence
  source: /note="Description of Artificial Sequence: Synthetic Linker"
RGTLNVS

SEQ ID NO: 4473 - protein, 9 aa, Artificial Sequence
  source: /note="Description of Artificial Sequence: Synthetic Linker"
TVGAGLPII

SEQ ID NO: 4474 - protein, 4 aa, Artificial Sequence
  source: /note="Description of Artificial Sequence: Synthetic Linker"
LDGE

SEQ ID NO: 4475 - protein, 4 aa, Artificial Sequence
  source: /note="Description of Artificial Sequence: Synthetic Linker"
LGNW

SEQ ID NO: 4476 - protein, 7 aa, Artificial Sequence
  source: /note="Description of Artificial Sequence: Synthetic Linker"
HLFPDCA

SEQ ID NO: 4477 - protein, 18 aa, Artificial Sequence
  source: /note="Description of Artificial Sequence: Synthetic Linker"
IPKAELLTSESRGVLPDT

SEQ ID NO: 4478 - protein, 5 aa, Artificial Sequence
  source: /note="Description of Artificial Sequence: Synthetic Linker"
ETVAP

SEQ ID NO: 4479 - protein, 6 aa, Artificial Sequence
  source: /note="Description of Artificial Sequence: Synthetic Linker"
QGLTSF

SEQ ID NO: 4480 - protein, 7 aa, Artificial Sequence
  source: /note="Description of Artificial Sequence: Synthetic Linker"
VSKPKME

SEQ ID NO: 4481 - protein, 5 aa, Artificial Sequence
  source: /note="Description of Artificial Sequence: Synthetic Linker"
TVAAP

SEQ ID NO: 4482 - protein, 26 aa, Artificial Sequence
  source: /note="Description of Artificial Sequence: Synthetic Linker"
GGNPPGGNRGTTTTRRPATTTGSSPG

SEQ ID NO: 4483 - protein, 7 aa, Artificial Sequence
  source: /note="Description of Artificial Sequence: Synthetic Linker"
CKPCICT

SEQ ID NO: 4484 - protein, 6 aa, Artificial Sequence
  source: /note="Description of Artificial Sequence: Synthetic Linker"
VPSEVS

SEQ ID NO: 4485 - protein, 10 aa, Artificial Sequence
  source: /note="Description of Artificial Sequence: Synthetic Linker"
EPKSCDKTHT

SEQ ID NO: 4486 - protein, 7 aa, Artificial Sequence
  source: /note="Description of Artificial Sequence: Synthetic Linker"
CPPCKCP

SEQ ID NO: 4487 - protein, 9 aa, Artificial Sequence
  source: /note="Description of Artificial Sequence: Synthetic Linker"
EPRGPTIKP

SEQ ID NO: 4488 - protein, 5 aa, Artificial Sequence
  source: /note="Description of Artificial Sequence: Synthetic Linker"
ATENE

SEQ ID NO: 4489 - protein, 6 aa, Artificial Sequence
  source: /note="Description of Artificial Sequence: Synthetic Linker"
AKSVGI

SEQ ID NO: 4490 - protein, 7 aa, Artificial Sequence
  source: /note="Description of Artificial Sequence: Synthetic Linker"
ATWTGDS

SEQ ID NO: 4491 - protein, 10 aa, Artificial Sequence
  source: /note="Description of Artificial Sequence: Synthetic Linker"
ATITNANWDD

SEQ ID NO: 4492 - protein, 11 aa, Artificial Sequence
  source: /note="Description of Artificial Sequence: Synthetic Linker"
NGKDFSEPLPE

SEQ ID NO: 4493 - protein, 6 aa, Artificial Sequence
  source: /note="Description of Artificial Sequence: Synthetic Linker"
KQPLRR

SEQ ID NO: 4494 - protein, 8 aa, Artificial Sequence
  source: /note="Description of Artificial Sequence: Synthetic Linker"
LSPYTESS

SEQ ID NO: 4495 - protein, 4 aa, Artificial Sequence
  source: /note="Description of Artificial Sequence: Synthetic Linker"
VDSE

SEQ ID NO: 4496 - protein, 5 aa, Artificial Sequence
  source: /note="Description of Artificial Sequence: Synthetic Linker"
FVTGP

SEQ ID NO: 4497 - protein, 7 aa, Artificial Sequence
  source: /note="Description of Artificial Sequence: Synthetic Linker"
IKGDAYY

SEQ ID NO: 4498 - protein, 8 aa, Artificial Sequence
  source: /note="Description of Artificial Sequence: Synthetic Linker"
TKSGVVHF

SEQ ID NO: 4499 - protein, 9 aa, Artificial Sequence
  source: /note="Description of Artificial Sequence: Synthetic Linker"
VVLGEEVSF

SEQ ID NO: 4500 - protein, 12 aa, Artificial Sequence
  source: /note="Description of Artificial Sequence: Synthetic Linker"
IVPNDAAKPYNM

SEQ ID NO: 4501 - protein, 26 aa, Artificial Sequence
  source: /note="Description of Artificial Sequence: Synthetic Linker"
YLPSNNMEEPPYIDTGDPADRDATGV

SEQ ID NO: 4502 - protein, 4 aa, Artificial Sequence
  source: /note="Description of Artificial Sequence: Synthetic Linker"
GALP

SEQ ID NO: 4503 - protein, 8 aa, Artificial Sequence
  source: /note="Description of Artificial Sequence: Synthetic Linker"
FGVDWLKG

SEQ ID NO: 4504 - protein, 4 aa, Artificial Sequence
  source: /note="Description of Artificial Sequence: Synthetic Linker"
ILPQ

SEQ ID NO: 4505 - protein, 7 aa, Artificial Sequence
  source: /note="Description of Artificial Sequence: Synthetic Linker"
EAPLDNS

SEQ ID NO: 4506 - protein, 14 aa, Artificial Sequence
  source: /note="Description of Artificial Sequence: Synthetic Linker"
AAERVPLANPFAGE

SEQ ID NO: 4507 - protein, 4 aa, Artificial Sequence
  source: /note="Description of Artificial Sequence: Synthetic Linker"
EGVL

SEQ ID NO: 4508 - protein, 6 aa, Artificial Sequence
  source: /note="Description of Artificial Sequence: Synthetic Linker"
LVKIEP

SEQ ID NO: 4509 - protein, 6 aa, Artificial Sequence
  source: /note="Description of Artificial Sequence: Synthetic Linker"
RSLIGD

SEQ ID NO: 4510 - protein, 7 aa, Artificial Sequence
  source: /note="Description of Artificial Sequence: Synthetic Linker"
DASAVHP

SEQ ID NO: 4511 - protein, 7 aa, Artificial Sequence
  source: /note="Description of Artificial Sequence: Synthetic Linker"
EFPELDV

SEQ ID NO: 4512 - protein, 7 aa, Artificial Sequence
  source: /note="Description of Artificial Sequence: Synthetic Linker"
FSDYFEH

SEQ ID NO: 4513 - protein, 7 aa, Artificial Sequence
  source: /note="Description of Artificial Sequence: Synthetic Linker"
KVSRLGE

SEQ ID NO: 4514 - protein, 7 aa, Artificial Sequence
  source: /note="Description of Artificial Sequence: Synthetic Linker"
NGAFRTR

SEQ ID NO: 4515 - protein, 7 aa, Artificial Sequence
  source: /note="Description of Artificial Sequence: Synthetic Linker"
PLKSAPS

SEQ ID NO: 4516 - protein, 8 aa, Artificial Sequence
  source: /note="Description of Artificial Sequence: Synthetic Linker"
ARISGLNS

SEQ ID NO: 4517 - protein, 10 aa, Artificial Sequence
  source: /note="Description of Artificial Sequence: Synthetic Linker"
QRIAADTERD

SEQ ID NO: 4518 - protein, 11 aa, Artificial Sequence
  source: /note="Description of Artificial Sequence: Synthetic Linker"
ERFGLSNQGRA

SEQ ID NO: 4519 - protein, 11 aa, Artificial Sequence
  source: /note="Description of Artificial Sequence: Synthetic Linker"
LLAAPAGPRAT

SEQ ID NO: 4520 - protein, 12 aa, Artificial Sequence
  source: /note="Description of Artificial Sequence: Synthetic Linker"
KVGEEAPGTLHP

SEQ ID NO: 4521 - protein, 12 aa, Artificial Sequence
  source: /note="Description of Artificial Sequence: Synthetic Linker"
NAVGVDVNTASA

SEQ ID NO: 4522 - protein, 13 aa, Artificial Sequence
  source: /note="Description of Artificial Sequence: Synthetic Linker"
AAGFLRVMNGDNP

SEQ ID NO: 4523 - protein, 13 aa, Artificial Sequence
  source: /note="Description of Artificial Sequence: Synthetic Linker"
GVESLKDLKPGMV

SEQ ID NO: 4524 - protein, 13 aa, Artificial Sequence
  source: /note="Description of Artificial Sequence: Synthetic Linker"
SIGVGQYQHDVSQ

SEQ ID NO: 4525 - protein, 17 aa, Artificial Sequence
  source: /note="Description of Artificial Sequence: Synthetic Linker"
LDKPGRDPRPEFKTAEF

SEQ ID NO: 4526 - protein, 23 aa, Artificial Sequence
  source: /note="Description of Artificial Sequence: Synthetic Linker"
LKRLDPKKFTDETFGLPTVTDIL

SEQ ID NO: 4527 - protein, 4 aa, Artificial Sequence
  source: /note="Description of Artificial Sequence: Synthetic Linker"
LEGE

SEQ ID NO: 4528 - protein, 5 aa, Artificial Sequence
  source: /note="Description of Artificial Sequence: Synthetic Linker"
RLGFK

SEQ ID NO: 4529 - protein, 9 aa, Artificial Sequence
  source: /note="Description of Artificial Sequence: Synthetic Linker"
RGRPFEPPV

SEQ ID NO: 4530 - protein, 15 aa, Artificial Sequence
  source: /note="Description of Artificial Sequence: Synthetic Linker"
RGEVEETLKEDLPNV

SEQ ID NO: 4531 - protein, 4 aa, Artificial Sequence
  source: /note="Description of Artificial Sequence: Synthetic Linker"
LEYE

SEQ ID NO: 4532 - protein, 9 aa, Artificial Sequence
  source: /note="Description of Artificial Sequence: Synthetic Linker"
SYGLPPLNA

SEQ ID NO: 4533 - protein, 5 aa, Artificial Sequence
  source: /note="Description of Artificial Sequence: Synthetic Linker"
ILHDE

SEQ ID NO: 4534 - protein, 13 aa, Artificial Sequence
  source: /note="Description of Artificial Sequence: Synthetic Linker"
KGWGGLPIGTEGR

SEQ ID NO: 4535 - protein, 4 aa, Artificial Sequence
  source: /note="Description of Artificial Sequence: Synthetic Linker"
PQSP

SEQ ID NO: 4536 - protein, 6 aa, Artificial Sequence
  source: /note="Description of Artificial Sequence: Synthetic Linker"
DGFEAL

SEQ ID NO: 4537 - protein, 6 aa, Artificial Sequence
  source: /note="Description of Artificial Sequence: Synthetic Linker"
EQNPWK

SEQ ID NO: 4538 - protein, 6 aa, Artificial Sequence
  source: /note="Description of Artificial Sequence: Synthetic Linker"
SEHWQR

SEQ ID NO: 4539 - protein, 9 aa, Artificial Sequence
  source: /note="Description of Artificial Sequence: Synthetic Linker"
LDPQACPTV

SEQ ID NO: 4540 - protein, 5 aa, Artificial Sequence
  source: /note="Description of Artificial Sequence: Synthetic Linker"
KTPLT

SEQ ID NO: 4541 - protein, 6 aa, Artificial Sequence
  source: /note="Description of Artificial Sequence: Synthetic Linker"
LRQLTT

SEQ ID NO: 4542 - protein, 4 aa, Artificial Sequence
  source: /note="Description of Artificial Sequence: Synthetic Linker"
QNDI

SEQ ID NO: 4543 - protein, 7 aa, Artificial Sequence
  source: /note="Description of Artificial Sequence: Synthetic Linker"
INARAPV

SEQ ID NO: 4544 - protein, 9 aa, Artificial Sequence
  source: /note="Description of Artificial Sequence: Synthetic Linker"
TVTHGDIDL

SEQ ID NO: 4545 - protein, 10 aa, Artificial Sequence
  source: /note="Description of Artificial Sequence: Synthetic Linker"
TKTDVAGEAE

SEQ ID NO: 4546 - protein, 24 aa, Artificial Sequence
  source: /note="Description of Artificial Sequence: Synthetic Linker"
LFNTNGFMLEENVVSTKPRFHFIA

SEQ ID NO: 4547 - protein, 7 aa, Artificial Sequence
  source: /note="Description of Artificial Sequence: Synthetic Linker"
ASLDQPF

SEQ ID NO: 4548 - protein, 9 aa, Artificial Sequence
  source: /note="Description of Artificial Sequence: Synthetic Linker"
VKPGRQYQE

SEQ ID NO: 4549 - protein, 4 aa, Artificial Sequence
  source: /note="Description of Artificial Sequence: Synthetic Linker"
DGFE

SEQ ID NO: 4550 - protein, 5 aa, Artificial Sequence
  source: /note="Description of Artificial Sequence: Synthetic Linker"
LRRFN

SEQ ID NO: 4551 - protein, 6 aa, Artificial Sequence
  source: /note="Description of Artificial Sequence: Synthetic Linker"
KRTGET

SEQ ID NO: 4552 - protein, 16 aa, Artificial Sequence
  source: /note="Description of Artificial Sequence: Synthetic Linker"
VEGEQSIPMVSRLGMK

SEQ ID NO: 4553 - protein, 22 aa, Artificial Sequence
  source: /note="Description of Artificial Sequence: Synthetic Linker"
AEGHITTNHVAATRAAKSKVRR

SEQ ID NO: 4554 - protein, 8 aa, Artificial Sequence
  source: /note="Description of Artificial Sequence: Synthetic Linker"
VDKSDEPL

SEQ ID NO: 4555 - protein, 7 aa, Artificial Sequence
  source: /note="Description of Artificial Sequence: Synthetic Linker"
IVSPANE

SEQ ID NO: 4556 - protein, 11 aa, Artificial Sequence
  source: /note="Description of Artificial Sequence: Synthetic Linker"
VENEPNLCYNA

SEQ ID NO: 4557 - protein, 13 aa, Artificial Sequence
  source: /note="Description of Artificial Sequence: Synthetic Linker"
FITLEENKPTRPV

SEQ ID NO: 4558 - protein, 4 aa, Artificial Sequence
  source: /note="Description of Artificial Sequence: Synthetic Linker"
EDGI

SEQ ID NO: 4559 - protein, 4 aa, Artificial Sequence
  source: /note="Description of Artificial Sequence: Synthetic Linker"
HKLK

SEQ ID NO: 4560 - protein, 4 aa, Artificial Sequence
  source: /note="Description of Artificial Sequence: Synthetic Linker"
KGGE

SEQ ID NO: 4561 - protein, 4 aa, Artificial Sequence
  source: /note="Description of Artificial Sequence: Synthetic Linker"
SHSL

SEQ ID NO: 4562 - protein, 6 aa, Artificial Sequence
  source: /note="Description of Artificial Sequence: Synthetic Linker"
WSTDIL

SEQ ID NO: 4563 - protein, 9 aa, Artificial Sequence
  source: /note="Description of Artificial Sequence: Synthetic Linker"
DIIKPDPPK

SEQ ID NO: 4564 - protein, 13 aa, Artificial Sequence
  source: /note="Description of Artificial Sequence: Synthetic Linker"
KDQKEPKNKTFLR

SEQ ID NO: 4565 - protein, 7 aa, Artificial Sequence
  source: /note="Description of Artificial Sequence: Synthetic Linker"
WDNQCQC

SEQ ID NO: 4566 - protein, 42 aa, Artificial Sequence
  source: /note="Description of Artificial Sequence: Synthetic Linker"
SSATRSTTKQVTPQPEEQKERKTTEMQSPMQPVDQASLPGHC

SEQ ID NO: 4567 - protein, 5 aa, Artificial Sequence
  source: /note="Description of Artificial Sequence: Synthetic Linker"
LNKPI

SEQ ID NO: 4568 - protein, 5 aa, Artificial Sequence
  source: /note="Description of Artificial Sequence: Synthetic Linker"
NHQSN

SEQ ID NO: 4569 - protein, 5 aa, Artificial Sequence
  source: /note="Description of Artificial Sequence: Synthetic Linker"
NSIDQ

SEQ ID NO: 4570 - protein, 7 aa, Artificial Sequence
  source: /note="Description of Artificial Sequence: Synthetic Linker"
YLPNVTK

SEQ ID NO: 4571 - protein, 9 aa, Artificial Sequence
  source: /note="Description of Artificial Sequence: Synthetic Linker"
LANLKNLGW

SEQ ID NO: 4572 - protein, 9 aa, Artificial Sequence
  source: /note="Description of Artificial Sequence: Synthetic Linker"
LKDLKKLKS

SEQ ID NO: 4573 - protein, 10 aa, Artificial Sequence
  source: /note="Description of Artificial Sequence: Synthetic Linker"
FLDENKVKDL

SEQ ID NO: 4574 - protein, 10 aa, Artificial Sequence
  source: /note="Description of Artificial Sequence: Synthetic Linker"
NLKKKSVTDA

SEQ ID NO: 4575 - protein, 11 aa, Artificial Sequence
  source: /note="Description of Artificial Sequence: Synthetic Linker"
FLNGNKLTDIK

SEQ ID NO: 4576 - protein, 11 aa, Artificial Sequence
  source: /note="Description of Artificial Sequence: Synthetic Linker"
PNTVKNTDGSL

SEQ ID NO: 4577 - protein, 11 aa, Artificial Sequence
  source: /note="Description of Artificial Sequence: Synthetic Linker"
SLEHNGISDIN

SEQ ID NO: 4578 - protein, 13 aa, Artificial Sequence
  source: /note="Description of Artificial Sequence: Synthetic Linker"
IANNSDIKSVQGI

SEQ ID NO: 4579 - protein, 5 aa, Artificial Sequence
  source: /note="Description of Artificial Sequence: Synthetic Linker"
FTTLT

SEQ ID NO: 4580 - protein, 5 aa, Artificial Sequence
  source: /note="Description of Artificial Sequence: Synthetic Linker"
KAPEV

SEQ ID NO: 4581 - protein, 9 aa, Artificial Sequence
  source: /note="Description of Artificial Sequence: Synthetic Linker"
VSDVAVDVV

SEQ ID NO: 4582 - protein, 6 aa, Artificial Sequence
  source: /note="Description of Artificial Sequence: Synthetic Linker"
INTSYF

SEQ ID NO: 4583 - protein, 22 aa, Artificial Sequence
  source: /note="Description of Artificial Sequence: Synthetic Linker"
SGIISLEDLPDYTRSDEPLNSI

SEQ ID NO: 4584 - protein, 4 aa, Artificial Sequence
  source: /note="Description of Artificial Sequence: Synthetic Linker"
VNGQ

SEQ ID NO: 4585 - protein, 5 aa, Artificial Sequence
  source: /note="Description of Artificial Sequence: Synthetic Linker"
FKNAT

SEQ ID NO: 4586 - protein, 5 aa, Artificial Sequence
  source: /note="Description of Artificial Sequence: Synthetic Linker"
FYPNR

SEQ ID NO: 4587 - protein, 5 aa, Artificial Sequence
  source: /note="Description of Artificial Sequence: Synthetic Linker"
MDNDV

SEQ ID NO: 4588 - protein, 6 aa, Artificial Sequence
  source: /note="Description of Artificial Sequence: Synthetic Linker"
FPVPTL

SEQ ID NO: 4589 - protein, 6 aa, Artificial Sequence
  source: /note="Description of Artificial Sequence: Synthetic Linker"
VNDQGQ

SEQ ID NO: 4590 - protein, 7 aa, Artificial Sequence
  source: /note="Description of Artificial Sequence: Synthetic Linker"
SSFTPNV

SEQ ID NO: 4591 - protein, 7 aa, Artificial Sequence
  source: /note="Description of Artificial Sequence: Synthetic Linker"
VKGTIAA

SEQ ID NO: 4592 - protein, 8 aa, Artificial Sequence
  source: /note="Description of Artificial Sequence: Synthetic Linker"
SKKFPSYS

SEQ ID NO: 4593 - protein, 9 aa, Artificial Sequence
  source: /note="Description of Artificial Sequence: Synthetic Linker"
ITYQTYSEV

SEQ ID NO: 4594 - protein, 10 aa, Artificial Sequence
  source: /note="Description of Artificial Sequence: Synthetic Linker"
FATDKGFPKT

SEQ ID NO: 4595 - protein, 12 aa, Artificial Sequence
  source: /note="Description of Artificial Sequence: Synthetic Linker"
TADPIPDAGRSS

SEQ ID NO: 4596 - protein, 4 aa, Artificial Sequence
  source: /note="Description of Artificial Sequence: Synthetic Linker"
EKCF

SEQ ID NO: 4597 - protein, 4 aa, Artificial Sequence
  source: /note="Description of Artificial Sequence: Synthetic Linker"
KNGK

SEQ ID NO: 4598 - protein, 5 aa, Artificial Sequence
  source: /note="Description of Artificial Sequence: Synthetic Linker"
EKSHM

SEQ ID NO: 4599 - protein, 5 aa, Artificial Sequence
  source: /note="Description of Artificial Sequence: Synthetic Linker"
NTNSD

SEQ ID NO: 4600 - protein, 6 aa, Artificial Sequence
  source: /note="Description of Artificial Sequence: Synthetic Linker"
NAPEKH

SEQ ID NO: 4601 - protein, 7 aa, Artificial Sequence
  source: /note="Description of Artificial Sequence: Synthetic Linker"
ACPVAAL

SEQ ID NO: 4602 - protein, 7 aa, Artificial Sequence
  source: /note="Description of Artificial Sequence: Synthetic Linker"
DERSKSL

SEQ ID NO: 4603 - protein, 7 aa, Artificial Sequence
  source: /note="Description of Artificial Sequence: Synthetic Linker"
KCLLCGR

SEQ ID NO: 4604 - protein, 7 aa, Artificial Sequence
  source: /note="Description of Artificial Sequence: Synthetic Linker"
TETYAMK

SEQ ID NO: 4605 - protein, 9 aa, Artificial Sequence
  source: /note="Description of Artificial Sequence: Synthetic Linker"
DTNCLLCGQ

SEQ ID NO: 4606 - protein, 10 aa, Artificial Sequence
  source: /note="Description of Artificial Sequence: Synthetic Linker"
NGGGQPHVNP

SEQ ID NO: 4607 - protein, 14 aa, Artificial Sequence
  source: /note="Description of Artificial Sequence: Synthetic Linker"
YKARASKPFLPKDK

SEQ ID NO: 4608 - protein, 18 aa, Artificial Sequence
  source: /note="Description of Artificial Sequence: Synthetic Linker"
LDIHEFKCGPCNRRENCE

SEQ ID NO: 4609 - protein, 6 aa, Artificial Sequence
  source: /note="Description of Artificial Sequence: Synthetic Linker"
VVGGEL

SEQ ID NO: 4610 - protein, 5 aa, Artificial Sequence
  source: /note="Description of Artificial Sequence: Synthetic Linker"
HNGFF

SEQ ID NO: 4611 - protein, 11 aa, Artificial Sequence
  source: /note="Description of Artificial Sequence: Synthetic Linker"
VKGKEGDEEEE

SEQ ID NO: 4612 - protein, 4 aa, Artificial Sequence
  source: /note="Description of Artificial Sequence: Synthetic Linker"
KLIV

SEQ ID NO: 4613 - protein, 6 aa, Artificial Sequence
  source: /note="Description of Artificial Sequence: Synthetic Linker"
TIGNRA

SEQ ID NO: 4614 - protein, 13 aa, Artificial Sequence
  source: /note="Description of Artificial Sequence: Synthetic Linker"
VPPSKPTVNIPSS

SEQ ID NO: 4615 - protein, 5 aa, Artificial Sequence
  source: /note="Description of Artificial Sequence: Synthetic Linker"
FFSIL

SEQ ID NO: 4616 - protein, 6 aa, Artificial Sequence
  source: /note="Description of Artificial Sequence: Synthetic Linker"
TTGEWK

SEQ ID NO: 4617 - protein, 7 aa, Artificial Sequence
  source: /note="Description of Artificial Sequence: Synthetic Linker"
MSTEEAE

SEQ ID NO: 4618 - protein, 8 aa, Artificial Sequence
  source: /note="Description of Artificial Sequence: Synthetic Linker"
ASQVESDW

SEQ ID NO: 4619 - protein, 7 aa, Artificial Sequence
  source: /note="Description of Artificial Sequence: Synthetic Linker"
KLHLSNC

SEQ ID NO: 4620 - protein, 4 aa, Artificial Sequence
  source: /note="Description of Artificial Sequence: Synthetic Linker"
DANF

SEQ ID NO: 4621 - protein, 7 aa, Artificial Sequence
  source: /note="Description of Artificial Sequence: Synthetic Linker"
VGLEKNA

SEQ ID NO: 4622 - protein, 8 aa, Artificial Sequence
  source: /note="Description of Artificial Sequence: Synthetic Linker"
TNSTEETL

SEQ ID NO: 4623 - protein, 9 aa, Artificial Sequence
  source: /note="Description of Artificial Sequence: Synthetic Linker"
KTWENVNAQ

SEQ ID NO: 4624 - protein, 9 aa, Artificial Sequence
  source: /note="Description of Artificial Sequence: Synthetic Linker"
YLPTLYVSQ

SEQ ID NO: 4625 - protein, 11 aa, Artificial Sequence
  source: /note="Description of Artificial Sequence: Synthetic Linker"
SHRYGFGKIDA

SEQ ID NO: 4626 - protein, 12 aa, Artificial Sequence
  source: /note="Description of Artificial Sequence: Synthetic Linker"
GDWRDSAMGKKY

SEQ ID NO: 4627 - protein, 4 aa, Artificial Sequence
  source: /note="Description of Artificial Sequence: Synthetic Linker"
KGTL

SEQ ID NO: 4628 - protein, 7 aa, Artificial Sequence
  source: /note="Description of Artificial Sequence: Synthetic Linker"
KLNKDIV

SEQ ID NO: 4629 - protein, 8 aa, Artificial Sequence
  source: /note="Description of Artificial Sequence: Synthetic Linker"
ETRKRALS

SEQ ID NO: 4630 - protein, 33 aa, Artificial Sequence
  source: /note="Description of Artificial Sequence: Synthetic Linker"
VYPPDYNPEGKVTKRKHDNEGSGSKRPKVEYSE

SEQ ID NO: 4631 - protein, 8 aa, Artificial Sequence
  source: /note="Description of Artificial Sequence: Synthetic Linker"
IERHSIHW

SEQ ID NO: 4632 - protein, 9 aa, Artificial Sequence
  source: /note="Description of Artificial Sequence: Synthetic Linker"
DLTGTPLFV

SEQ ID NO: 4633 - protein, 10 aa, Artificial Sequence
  source: /note="Description of Artificial Sequence: Synthetic Linker"
NGPASLPYDI

SEQ ID NO: 4634 - protein, 14 aa, Artificial Sequence
  source: /note="Description of Artificial Sequence: Synthetic Linker"
VNGSDINVDWGKPI

SEQ ID NO: 4635 - protein, 44 aa, Artificial Sequence
  source: /note="Description of Artificial Sequence: Synthetic Linker"
YAGAPGGLPTDEGTPPVDHQCLDTLDVRPVVPRSVPVNSFVKRP

SEQ ID NO: 4636 - protein, 6 aa, Artificial Sequence
  source: /note="Description of Artificial Sequence: Synthetic Linker"
QFGRKG

SEQ ID NO: 4637 - protein, 9 aa, Artificial Sequence
  source: /note="Description of Artificial Sequence: Synthetic Linker"
IASGAIGGL

SEQ ID NO: 4638 - protein, 4 aa, Artificial Sequence
  source: /note="Description of Artificial Sequence: Synthetic Linker"
SGNP

SEQ ID NO: 4639 - protein, 6 aa, Artificial Sequence
  source: /note="Description of Artificial Sequence: Synthetic Linker"
VTGISP

SEQ ID NO: 4640 - protein, 6 aa, Artificial Sequence
  source: /note="Description of Artificial Sequence: Synthetic Linker"
IKRADA

SEQ ID NO: 4641 - protein, 7 aa, Artificial Sequence
  source: /note="Description of Artificial Sequence: Synthetic Linker"
VQPKLTA

SEQ ID NO: 4642 - protein, 14 aa, Artificial Sequence
  source: /note="Description of Artificial Sequence: Synthetic Linker"
TGVMKNDTNENLKK

SEQ ID NO: 4643 - protein, 24 aa, Artificial Sequence
  source: /note="Description of Artificial Sequence: Synthetic Linker"
FLPRVGVGTSFGLPQTRRISLASP

SEQ ID NO: 4644 - protein, 4 aa, Artificial Sequence
  source: /note="Description of Artificial Sequence: Synthetic Linker"
ASNM

SEQ ID NO: 4645 - protein, 6 aa, Artificial Sequence
  source: /note="Description of Artificial Sequence: Synthetic Linker"
ESKPSV

SEQ ID NO: 4646 - protein, 7 aa, Artificial Sequence
  source: /note="Description of Artificial Sequence: Synthetic Linker"
IKMLGSK

SEQ ID NO: 4647 - protein, 7 aa, Artificial Sequence
  source: /note="Description of Artificial Sequence: Synthetic Linker"
LRREPNL

SEQ ID NO: 4648 - protein, 7 aa, Artificial Sequence
  source: /note="Description of Artificial Sequence: Synthetic Linker"
LSRSSNP

SEQ ID NO: 4649 - protein, 8 aa, Artificial Sequence
  source: /note="Description of Artificial Sequence: Synthetic Linker"
RLGCRYSK

SEQ ID NO: 4650 - protein, 4 aa, Artificial Sequence
  source: /note="Description of Artificial Sequence: Synthetic Linker"
ETPA

SEQ ID NO: 4651 - protein, 8 aa, Artificial Sequence
  source: /note="Description of Artificial Sequence: Synthetic Linker"
FANHTYVP

SEQ ID NO: 4652 - protein, 5 aa, Artificial Sequence
  source: /note="Description of Artificial Sequence: Synthetic Linker"
LFEWL

SEQ ID NO: 4653 - protein, 14 aa, Artificial Sequence
  source: /note="Description of Artificial Sequence: Synthetic Linker"
HELGGKNASGGYGG

SEQ ID NO: 4654 - protein, 5 aa, Artificial Sequence
  source: /note="Description of Artificial Sequence: Synthetic Linker"
RGDVG

SEQ ID NO: 4655 - protein, 4 aa, Artificial Sequence
  source: /note="Description of Artificial Sequence: Synthetic Linker"
DYTR

SEQ ID NO: 4656 - protein, 8 aa, Artificial Sequence
  source: /note="Description of Artificial Sequence: Synthetic Linker"
QTQAVSQQ

SEQ ID NO: 4657 - protein, 8 aa, Artificial Sequence
  source: /note="Description of Artificial Sequence: Synthetic Linker"
YTDHQMLV

SEQ ID NO: 4658 - protein, 4 aa, Artificial Sequence
  source: /note="Description of Artificial Sequence: Synthetic Linker"
LNNR

SEQ ID NO: 4659 - protein, 12 aa, Artificial Sequence
  source: /note="Description of Artificial Sequence: Synthetic Linker"
TCRKTNKLSPYD

SEQ ID NO: 4660 - protein, 5 aa, Artificial Sequence
  source: /note="Description of Artificial Sequence: Synthetic Linker"
VVNNV

SEQ ID NO: 4661 - protein, 7 aa, Artificial Sequence
  source: /note="Description of Artificial Sequence: Synthetic Linker"
VQARASS

SEQ ID NO: 4662 - protein, 8 aa, Artificial Sequence
  source: /note="Description of Artificial Sequence: Synthetic Linker"
TYIPRKEV

SEQ ID NO: 4663 - protein, 10 aa, Artificial Sequence
  source: /note="Description of Artificial Sequence: Synthetic Linker"
IQATIIRQNQ

SEQ ID NO: 4664 - protein, 4 aa, Artificial Sequence
  source: /note="Description of Artificial Sequence: Synthetic Linker"
KGDD

SEQ ID NO: 4665 - protein, 4 aa, Artificial Sequence
  source: /note="Description of Artificial Sequence: Synthetic Linker"
SDVV

SEQ ID NO: 4666 - protein, 6 aa, Artificial Sequence
  source: /note="Description of Artificial Sequence: Synthetic Linker"
VAQSSY

SEQ ID NO: 4667 - protein, 8 aa, Artificial Sequence
  source: /note="Description of Artificial Sequence: Synthetic Linker"
TSRDYDTQ

SEQ ID NO: 4668 - protein, 11 aa, Artificial Sequence
  source: /note="Description of Artificial Sequence: Synthetic Linker"
YAPFLPKTWTS

SEQ ID NO: 4669 - protein, 5 aa, Artificial Sequence
  source: /note="Description of Artificial Sequence: Synthetic Linker"
AGVNL

SEQ ID NO: 4670 - protein, 11 aa, Artificial Sequence
  source: /note="Description of Artificial Sequence: Synthetic Linker"
TLLLKSPTTHP

SEQ ID NO: 4671 - protein, 5 aa, Artificial Sequence
  source: /note="Description of Artificial Sequence: Synthetic Linker"
VESAM

SEQ ID NO: 4672 - protein, 6 aa, Artificial Sequence
  source: /note="Description of Artificial Sequence: Synthetic Linker"
GPLWSN

SEQ ID NO: 4673 - protein, 9 aa, Artificial Sequence
  source: /note="Description of Artificial Sequence: Synthetic Linker"
QVENTGIHE

SEQ ID NO: 4674 - protein, 8 aa, Artificial Sequence
  source: /note="Description of Artificial Sequence: Synthetic Linker"
SCDNLPHN

SEQ ID NO: 4675 - protein, 16 aa, Artificial Sequence
  source: /note="Description of Artificial Sequence: Synthetic Linker"
ICDRNHTWLPVSDDAC

SEQ ID NO: 4676 - protein, 4 aa, Artificial Sequence
  source: /note="Description of Artificial Sequence: Synthetic Linker"
YYPA

SEQ ID NO: 4677 - protein, 5 aa, Artificial Sequence
  source: /note="Description of Artificial Sequence: Synthetic Linker"
SGQPL

SEQ ID NO: 4678 - protein, 5 aa, Artificial Sequence
  source: /note="Description of Artificial Sequence: Synthetic Linker"
VYSGK

SEQ ID NO: 4679 - protein, 7 aa, Artificial Sequence
  source: /note="Description of Artificial Sequence: Synthetic Linker"
VNDQGKE

SEQ ID NO: 4680 - protein, 11 aa, Artificial Sequence
  source: /note="Description of Artificial Sequence: Synthetic Linker"
FGNKYWLMLNE

SEQ ID NO: 4681 - protein, 19 aa, Artificial Sequence
  source: /note="Description of Artificial Sequence: Synthetic Linker"
QSFAPVKGASAVPLVGRAS

SEQ ID NO: 4682 - protein, 4 aa, Artificial Sequence
  source: /note="Description of Artificial Sequence: Synthetic Linker"
PVSE

SEQ ID NO: 4683 - protein, 5 aa, Artificial Sequence
  source: /note="Description of Artificial Sequence: Synthetic Linker"
AGKLV

SEQ ID NO: 4684 - protein, 7 aa, Artificial Sequence
  source: /note="Description of Artificial Sequence: Synthetic Linker"
LEKDGSN

SEQ ID NO: 4685 - protein, 14 aa, Artificial Sequence
  source: /note="Description of Artificial Sequence: Synthetic Linker"
NNDPSWNPGPTWDP

SEQ ID NO: 4686 - protein, 4 aa, Artificial Sequence
  source: /note="Description of Artificial Sequence: Synthetic Linker"
GVPF

SEQ ID NO: 4687 - protein, 4 aa, Artificial Sequence
  source: /note="Description of Artificial Sequence: Synthetic Linker"
ICQS

SEQ ID NO: 4688 - protein, 6 aa, Artificial Sequence
  source: /note="Description of Artificial Sequence: Synthetic Linker"
VNYEDP

SEQ ID NO: 4689 - protein, 8 aa, Artificial Sequence
  source: /note="Description of Artificial Sequence: Synthetic Linker"
RARGENEP

SEQ ID NO: 4690 - protein, 6 aa, Artificial Sequence
  source: /note="Description of Artificial Sequence: Synthetic Linker"
LAGTGP

SEQ ID NO: 4691 - protein, 10 aa, Artificial Sequence
  source: /note="Description of Artificial Sequence: Synthetic Linker"
AAGGSVKGKK

SEQ ID NO: 4692 - protein, 8 aa, Artificial Sequence
  source: /note="Description of Artificial Sequence: Synthetic Linker"
LMTPEYVA

SEQ ID NO: 4693 - protein, 17 aa, Artificial Sequence
  source: /note="Description of Artificial Sequence: Synthetic Linker"
GFESVLEAVTALAFYVP

SEQ ID NO: 4694 - protein, 18 aa, Artificial Sequence
  source: /note="Description of Artificial Sequence: Synthetic Linker"
HKLGAVDVPDLVYSEAGP

SEQ ID NO: 4695 - protein, 35 aa, Artificial Sequence
  source: /note="Description of Artificial Sequence: Synthetic Linker"
QHPPKDSSGQRVAVSPTSQRLQLLEPFDKWDGKDL

SEQ ID NO: 4696 - protein, 41 aa, Artificial Sequence
  source: /note="Description of Artificial Sequence: Synthetic Linker"
TLKFNPETDFLTGKDGKKFKLEAPDADELPRAEFDPGQDTY

SEQ ID NO: 4697 - protein, 4 aa, Artificial Sequence
  source: /note="Description of Artificial Sequence: Synthetic Linker"
LVLE

SEQ ID NO: 4698 - protein, 4 aa, Artificial Sequence
  source: /note="Description of Artificial Sequence: Synthetic Linker"
SESG

SEQ ID NO: 4699 - protein, 5 aa, Artificial Sequence
  source: /note="Description of Artificial Sequence: Synthetic Linker"
EISGM

SEQ ID NO: 4700 - protein, 5 aa, Artificial Sequence
  source: /note="Description of Artificial Sequence: Synthetic Linker"
FAARS

SEQ ID NO: 4701 - protein, 7 aa, Artificial Sequence
  source: /note="Description of Artificial Sequence: Synthetic Linker"
QKSGKGL

SEQ ID NO: 4702 - protein, 11 aa, Artificial Sequence
  source: /note="Description of Artificial Sequence: Synthetic Linker"
GEVFPQKKVSA

SEQ ID NO: 4703 - protein, 13 aa, Artificial Sequence
  source: /note="Description of Artificial Sequence: Synthetic Linker"
KHPAVRKEPGPGL

SEQ ID NO: 4704 - protein, 14 aa, Artificial Sequence
  source: /note="Description of Artificial Sequence: Synthetic Linker"
YPHWEGEIIRFETE

SEQ ID NO: 4705 - protein, 9 aa, Artificial Sequence
  source: /note="Description of Artificial Sequence: Synthetic Linker"
EYPALGEVF

SEQ ID NO: 4706 - protein, 7 aa, Artificial Sequence
  source: /note="Description of Artificial Sequence: Synthetic Linker"
QDDDCTP

SEQ ID NO: 4707 - protein, 4 aa, Artificial Sequence
  source: /note="Description of Artificial Sequence: Synthetic Linker"
HNGK

SEQ ID NO: 4708 - protein, 5 aa, Artificial Sequence
  source: /note="Description of Artificial Sequence: Synthetic Linker"
SSVSR

SEQ ID NO: 4709 - protein, 6 aa, Artificial Sequence
  source: /note="Description of Artificial Sequence: Synthetic Linker"
AAHPVG

SEQ ID NO: 4710 - protein, 6 aa, Artificial Sequence
  source: /note="Description of Artificial Sequence: Synthetic Linker"
ARFDVT

SEQ ID NO: 4711 - protein, 6 aa, Artificial Sequence
  source: /note="Description of Artificial Sequence: Synthetic Linker"
EGRDMN

SEQ ID NO: 4712 - protein, 6 aa, Artificial Sequence
  source: /note="Description of Artificial Sequence: Synthetic Linker"
KFLRTE

SEQ ID NO: 4713 - protein, 8 aa, Artificial Sequence
  source: /note="Description of Artificial Sequence: Synthetic Linker"
LDLFYNTP

SEQ ID NO: 4714 - protein, 8 aa, Artificial Sequence
  source: /note="Description of Artificial Sequence: Synthetic Linker"
RTAEQQEA

SEQ ID NO: 4715 - protein, 11 aa, Artificial Sequence
  source: /note="Description of Artificial Sequence: Synthetic Linker"
YRAVPEGGQKE

SEQ ID NO: 4716 - protein, 8 aa, Artificial Sequence
  source: /note="Description of Artificial Sequence: Synthetic Linker"
HDPRRFGR

SEQ ID NO: 4717 - protein, 10 aa, Artificial Sequence
  source: /note="Description of Artificial Sequence: Synthetic Linker"
RRGDYREIPL

SEQ ID NO: 4718 - protein, 11 aa, Artificial Sequence
  source: /note="Description of Artificial Sequence: Synthetic Linker"
RHAVYGREGLP

SEQ ID NO: 4719 - protein, 23 aa, Artificial Sequence
  source: /note="Description of Artificial Sequence: Synthetic Linker"
ELGGSTLSDQSYRQPDGLPGGFQ

SEQ ID NO: 4720 - protein, 6 aa, Artificial Sequence
  source: /note="Description of Artificial Sequence: Synthetic Linker"
ESGKTS

SEQ ID NO: 4721 - protein, 7 aa, Artificial Sequence
  source: /note="Description of Artificial Sequence: Synthetic Linker"
FLDIHNI

SEQ ID NO: 4722 - protein, 7 aa, Artificial Sequence
  source: /note="Description of Artificial Sequence: Synthetic Linker"
VYPNIEE

SEQ ID NO: 4723 - protein, 9 aa, Artificial Sequence
  source: /note="Description of Artificial Sequence: Synthetic Linker"
RQGIPNESW

SEQ ID NO: 4724 - protein, 17 aa, Artificial Sequence
  source: /note="Description of Artificial Sequence: Synthetic Linker"
TKINERYELCDTYPALL

SEQ ID NO: 4725 - protein, 4 aa, Artificial Sequence
  source: /note="Description of Artificial Sequence: Synthetic Linker"
NGIV

SEQ ID NO: 4726 - protein, 5 aa, Artificial Sequence
  source: /note="Description of Artificial Sequence: Synthetic Linker"
SRRVP

SEQ ID NO: 4727 - protein, 17 aa, Artificial Sequence
  source: /note="Description of Artificial Sequence: Synthetic Linker"
LEKEKQFEKYSELKGTV

SEQ ID NO: 4728 - protein, 12 aa, Artificial Sequence
  source: /note="Description of Artificial Sequence: Synthetic Linker"
KDSPKGVGRPTK

SEQ ID NO: 4729 - protein, 4 aa, Artificial Sequence
  source: /note="Description of Artificial Sequence: Synthetic Linker"
ILIP

SEQ ID NO: 4730 - protein, 4 aa, Artificial Sequence
  source: /note="Description of Artificial Sequence: Synthetic Linker"
LAPA

SEQ ID NO: 4731 - protein, 5 aa, Artificial Sequence
  source: /note="Description of Artificial Sequence: Synthetic Linker"
CSGEY

SEQ ID NO: 4732 - protein, 5 aa, Artificial Sequence
  source: /note="Description of Artificial Sequence: Synthetic Linker"
STPHP

SEQ ID NO: 4733 - protein, 5 aa, Artificial Sequence
  source: /note="Description of Artificial Sequence: Synthetic Linker"
WGCDK

SEQ ID NO: 4734 - protein, 6 aa, Artificial Sequence
  source: /note="Description of Artificial Sequence: Synthetic Linker"
YFAMDE

SEQ ID NO: 4735 - protein, 9 aa, Artificial Sequence
  source: /note="Description of Artificial Sequence: Synthetic Linker"
RAETIDDIR

SEQ ID NO: 4736 - protein, 6 aa, Artificial Sequence
  source: /note="Description of Artificial Sequence: Synthetic Linker"
NDDIQG

SEQ ID NO: 4737 - protein, 7 aa, Artificial Sequence
  source: /note="Description of Artificial Sequence: Synthetic Linker"
YREKYCT

SEQ ID NO: 4738 - protein, 4 aa, Artificial Sequence
  source: /note="Description of Artificial Sequence: Synthetic Linker"
DADL

SEQ ID NO: 4739 - protein, 4 aa, Artificial Sequence
  source: /note="Description of Artificial Sequence: Synthetic Linker"
PNTA

SEQ ID NO: 4740 - protein, 5 aa, Artificial Sequence
  source: /note="Description of Artificial Sequence: Synthetic Linker"
VAVGV

SEQ ID NO: 4741 - protein, 6 aa, Artificial Sequence
  source: /note="Description of Artificial Sequence: Synthetic Linker"
VNIALA

SEQ ID NO: 4742 - protein, 17 aa, Artificial Sequence
  source: /note="Description of Artificial Sequence: Synthetic Linker"
KNLEEPVKPFPGVQGSS

SEQ ID NO: 4743 - protein, 26 aa, Artificial Sequence
  source: /note="Description of Artificial Sequence: Synthetic Linker"
LKGTLELHPNGLIKTDEYMRTSEPDV

SEQ ID NO: 4744 - protein, 6 aa, Artificial Sequence
  source: /note="Description of Artificial Sequence: Synthetic Linker"
YYPQIA

SEQ ID NO: 4745 - protein, 4 aa, Artificial Sequence
  source: /note="Description of Artificial Sequence: Synthetic Linker"
LGDA

SEQ ID NO: 4746 - protein, 7 aa, Artificial Sequence
  source: /note="Description of Artificial Sequence: Synthetic Linker"
FKHSGGL

SEQ ID NO: 4747 - protein, 20 aa, Artificial Sequence
  source: /note="Description of Artificial Sequence: Synthetic Linker"
FEAERKENCPACSQLPQNIQ

SEQ ID NO: 4748 - protein, 8 aa, Artificial Sequence
  source: /note="Description of Artificial Sequence: Synthetic Linker"
YGLDTINK

SEQ ID NO: 4749 - protein, 9 aa, Artificial Sequence
  source: /note="Description of Artificial Sequence: Synthetic Linker"
SMDNPDNEI

SEQ ID NO: 4750 - protein, 10 aa, Artificial Sequence
  source: /note="Description of Artificial Sequence: Synthetic Linker"
QQGRYPGVSN

SEQ ID NO: 4751 - protein, 8 aa, Artificial Sequence
  source: /note="Description of Artificial Sequence: Synthetic Linker"
TKLQNPDL

SEQ ID NO: 4752 - protein, 10 aa, Artificial Sequence
  source: /note="Description of Artificial Sequence: Synthetic Linker"
GGRGYGSESG

SEQ ID NO: 4753 - protein, 12 aa, Artificial Sequence
  source: /note="Description of Artificial Sequence: Synthetic Linker"
LQQHRPSPELTL

SEQ ID NO: 4754 - protein, 17 aa, Artificial Sequence
  source: /note="Description of Artificial Sequence: Synthetic Linker"
LGGKWQPGRGPCVLQEY

SEQ ID NO: 4755 - protein, 5 aa, Artificial Sequence
  source: /note="Description of Artificial Sequence: Synthetic Linker"
YQKLT

SEQ ID NO: 4756 - protein, 7 aa, Artificial Sequence
  source: /note="Description of Artificial Sequence: Synthetic Linker"
FISNQTI

SEQ ID NO: 4757 - protein, 7 aa, Artificial Sequence
  source: /note="Description of Artificial Sequence: Synthetic Linker"
SWEGNPI

SEQ ID NO: 4758 - protein, 8 aa, Artificial Sequence
  source: /note="Description of Artificial Sequence: Synthetic Linker"
FREVVSPQ

SEQ ID NO: 4759 - protein, 9 aa, Artificial Sequence
  source: /note="Description of Artificial Sequence: Synthetic Linker"
LADVPSSPY

SEQ ID NO: 4760 - protein, 4 aa, Artificial Sequence
  source: /note="Description of Artificial Sequence: Synthetic Linker"
FVSA

SEQ ID NO: 4761 - protein, 4 aa, Artificial Sequence
  source: /note="Description of Artificial Sequence: Synthetic Linker"
HKRS

SEQ ID NO: 4762 - protein, 5 aa, Artificial Sequence
  source: /note="Description of Artificial Sequence: Synthetic Linker"
KAAPD

SEQ ID NO: 4763 - protein, 19 aa, Artificial Sequence
  source: /note="Description of Artificial Sequence: Synthetic Linker"
PLDSPDETEDPEPNYAGEP

SEQ ID NO: 4764 - protein, 6 aa, Artificial Sequence
  source: /note="Description of Artificial Sequence: Synthetic Linker"
EVGNEE

SEQ ID NO: 4765 - protein, 13 aa, Artificial Sequence
  source: /note="Description of Artificial Sequence: Synthetic Linker"
ALPDEETGLELNE

SEQ ID NO: 4766 - protein, 4 aa, Artificial Sequence
  source: /note="Description of Artificial Sequence: Synthetic Linker"
QVDA

SEQ ID NO: 4767 - protein, 5 aa, Artificial Sequence
  source: /note="Description of Artificial Sequence: Synthetic Linker"
WRKDP

SEQ ID NO: 4768 - protein, 6 aa, Artificial Sequence
  source: /note="Description of Artificial Sequence: Synthetic Linker"
PSHGII

SEQ ID NO: 4769 - protein, 7 aa, Artificial Sequence
  source: /note="Description of Artificial Sequence: Synthetic Linker"
EGQGKAK

SEQ ID NO: 4770 - protein, 8 aa, Artificial Sequence
  source: /note="Description of Artificial Sequence: Synthetic Linker"
KINLAIKT

SEQ ID NO: 4771 - protein, 8 aa, Artificial Sequence
  source: /note="Description of Artificial Sequence: Synthetic Linker"
TEMYDTPT

SEQ ID NO: 4772 - protein, 6 aa, Artificial Sequence
  source: /note="Description of Artificial Sequence: Synthetic Linker"
AHELPM

SEQ ID NO: 4773 - protein, 12 aa, Artificial Sequence
  source: /note="Description of Artificial Sequence: Synthetic Linker"
EKPKGRDSKKVR

SEQ ID NO: 4774 - protein, 14 aa, Artificial Sequence
  source: /note="Description of Artificial Sequence: Synthetic Linker"
IEGTSPEIVVNPVR

SEQ ID NO: 4775 - protein, 7 aa, Artificial Sequence
  source: /note="Description of Artificial Sequence: Synthetic Linker"
QRTKVQI

SEQ ID NO: 4776 - protein, 26 aa, Artificial Sequence
  source: /note="Description of Artificial Sequence: Synthetic Linker"
VDMGFDTSKLGSYQRVAEPVVPPQEM

SEQ ID NO: 4777 - protein, 5 aa, Artificial Sequence
  source: /note="Description of Artificial Sequence: Synthetic Linker"
MNAHI

SEQ ID NO: 4778 - protein, 6 aa, Artificial Sequence
  source: /note="Description of Artificial Sequence: Synthetic Linker"
ADDYQA

SEQ ID NO: 4779 - protein, 6 aa, Artificial Sequence
  source: /note="Description of Artificial Sequence: Synthetic Linker"
YEGFTG

SEQ ID NO: 4780 - protein, 7 aa, Artificial Sequence
  source: /note="Description of Artificial Sequence: Synthetic Linker"
QVDDPLK

SEQ ID NO: 4781 - protein, 11 aa, Artificial Sequence
  source: /note="Description of Artificial Sequence: Synthetic Linker"
YKPKRFEYVTW

SEQ ID NO: 4782 - protein, 13 aa, Artificial Sequence
  source: /note="Description of Artificial Sequence: Synthetic Linker"
ILPLWHHDDTYLF

SEQ ID NO: 4783 - protein, 22 aa, Artificial Sequence
  source: /note="Description of Artificial Sequence: Synthetic Linker"
DMILPKKSVSKVKQTQLLTTEG

SEQ ID NO: 4784 - protein, 4 aa, Artificial Sequence
  source: /note="Description of Artificial Sequence: Synthetic Linker"
IDNP

SEQ ID NO: 4785 - protein, 4 aa, Artificial Sequence
  source: /note="Description of Artificial Sequence: Synthetic Linker"
GMDH

SEQ ID NO: 4786 - protein, 4 aa, Artificial Sequence
  source: /note="Description of Artificial Sequence: Synthetic Linker"
IGDC

SEQ ID NO: 4787 - protein, 5 aa, Artificial Sequence
  source: /note="Description of Artificial Sequence: Synthetic Linker"
EGVLH

SEQ ID NO: 4788 - protein, 5 aa, Artificial Sequence
  source: /note="Description of Artificial Sequence: Synthetic Linker"
NQKEL

SEQ ID NO: 4789 - protein, 5 aa, Artificial Sequence
  source: /note="Description of Artificial Sequence: Synthetic Linker"
QGNAL

SEQ ID NO: 4790 - protein, 5 aa, Artificial Sequence
  source: /note="Description of Artificial Sequence: Synthetic Linker"
QSGYQ

SEQ ID NO: 4791 - protein, 6 aa, Artificial Sequence
  source: /note="Description of Artificial Sequence: Synthetic Linker"
ARPDDE

SEQ ID NO: 4792 - protein, 6 aa, Artificial Sequence
  source: /note="Description of Artificial Sequence: Synthetic Linker"
MGVSAI

SEQ ID NO: 4793 - protein, 6 aa, Artificial Sequence
  source: /note="Description of Artificial Sequence: Synthetic Linker"
RNFQGY

SEQ ID NO: 4794 - protein, 7 aa, Artificial Sequence
  source: /note="Description of Artificial Sequence: Synthetic Linker"
TTQGDTD

SEQ ID NO: 4795 - protein, 5 aa, Artificial Sequence
  source: /note="Description of Artificial Sequence: Synthetic Linker"
IRDAN

SEQ ID NO: 4796 - protein, 7 aa, Artificial Sequence
  source: /note="Description of Artificial Sequence: Synthetic Linker"
YARPSSA

SEQ ID NO: 4797 - protein, 4 aa, Artificial Sequence
  source: /note="Description of Artificial Sequence: Synthetic Linker"
RGKF

SEQ ID NO: 4798 - protein, 4 aa, Artificial Sequence
  source: /note="Description of Artificial Sequence: Synthetic Linker"
THAV

SEQ ID NO: 4799 - protein, 5 aa, Artificial Sequence
  source: /note="Description of Artificial Sequence: Synthetic Linker"
ETPKI

SEQ ID NO: 4800 - protein, 5 aa, Artificial Sequence
  source: /note="Description of Artificial Sequence: Synthetic Linker"
SDTAN

SEQ ID NO: 4801 - protein, 7 aa, Artificial Sequence
  source: /note="Description of Artificial Sequence: Synthetic Linker"
TKQLAPT

SEQ ID NO: 4802 - protein, 10 aa, Artificial Sequence
  source: /note="Description of Artificial Sequence: Synthetic Linker"
AGDYKNLGGE

SEQ ID NO: 4803 - protein, 19 aa, Artificial Sequence
  source: /note="Description of Artificial Sequence: Synthetic Linker"
TYYTFNFSLEGAKMSLPGT

SEQ ID NO: 4804 - protein, 5 aa, Artificial Sequence
  source: /note="Description of Artificial Sequence: Synthetic Linker"
YNKSS

SEQ ID NO: 4805 - protein, 8 aa, Artificial Sequence
  source: /note="Description of Artificial Sequence: Synthetic Linker"
YGTPDYKY

SEQ ID NO: 4806 - protein, 11 aa, Artificial Sequence
  source: /note="Description of Artificial Sequence: Synthetic Linker"
PYGKAHTLGLK

SEQ ID NO: 4807 - protein, 6 aa, Artificial Sequence
  source: /note="Description of Artificial Sequence: Synthetic Linker"
DTEEKK

SEQ ID NO: 4808 - protein, 19 aa, Artificial Sequence
  source: /note="Description of Artificial Sequence: Synthetic Linker"
DIPNRRRKVSKHKHANFYP

SEQ ID NO: 4809 - protein, 6 aa, Artificial Sequence
  source: /note="Description of Artificial Sequence: Synthetic Linker"
PCSHVV

SEQ ID NO: 4810 - protein, 6 aa, Artificial Sequence
  source: /note="Description of Artificial Sequence: Synthetic Linker"
ANENGT

SEQ ID NO: 4811 - protein, 6 aa, Artificial Sequence
  source: /note="Description of Artificial Sequence: Synthetic Linker"
NRKNNI

SEQ ID NO: 4812 - protein, 8 aa, Artificial Sequence
  source: /note="Description of Artificial Sequence: Synthetic Linker"
LAPEDYTG

SEQ ID NO: 4813 - protein, 4 aa, Artificial Sequence
  source: /note="Description of Artificial Sequence: Synthetic Linker"
IGGK

SEQ ID NO: 4814 - protein, 4 aa, Artificial Sequence
  source: /note="Description of Artificial Sequence: Synthetic Linker"
VGDD

SEQ ID NO: 4815 - protein, 6 aa, Artificial Sequence
  source: /note="Description of Artificial Sequence: Synthetic Linker"
INTTKY

SEQ ID NO: 4816 - protein, 7 aa, Artificial Sequence
  source: /note="Description of Artificial Sequence: Synthetic Linker"
AATVTGY

SEQ ID NO: 4817 - protein, 7 aa, Artificial Sequence
  source: /note="Description of Artificial Sequence: Synthetic Linker"
GGADGKT

SEQ ID NO: 4818 - protein, 7 aa, Artificial Sequence
  source: /note="Description of Artificial Sequence: Synthetic Linker"
QNKDGSI

SEQ ID NO: 4819 - protein, 7 aa, Artificial Sequence
  source: /note="Description of Artificial Sequence: Synthetic Linker"
TDNNGKT

SEQ ID NO: 4820 - protein, 8 aa, Artificial Sequence
  source: /note="Description of Artificial Sequence: Synthetic Linker"
AAGVTGTA

SEQ ID NO: 4821 - protein, 9 aa, Artificial Sequence
  source: /note="Description of Artificial Sequence: Synthetic Linker"
QVGANDGET

SEQ ID NO: 4822 - protein, 11 aa, Artificial Sequence
  source: /note="Description of Artificial Sequence: Synthetic Linker"
TADDGTSKTAL

SEQ ID NO: 4823 - protein, 21 aa, Artificial Sequence
  source: /note="Description of Artificial Sequence: Synthetic Linker"
LKQINSQTLGLDTLNVQQKYK

SEQ ID NO: 4824 - protein, 23 aa, Artificial Sequence
  source: /note="Description of Artificial Sequence: Synthetic Linker"
AEGHNFKAQPDLAEAAATTTENP

SEQ ID NO: 4825 - protein, 4 aa, Artificial Sequence
  source: /note="Description of Artificial Sequence: Synthetic Linker"
AGAR

SEQ ID NO: 4826 - protein, 5 aa, Artificial Sequence
  source: /note="Description of Artificial Sequence: Synthetic Linker"
AEALL

SEQ ID NO: 4827 - protein, 6 aa, Artificial Sequence
  source: /note="Description of Artificial Sequence: Synthetic Linker"
AWPEEV

SEQ ID NO: 4828 - protein, 6 aa, Artificial Sequence
  source: /note="Description of Artificial Sequence: Synthetic Linker"
NRGVEA

SEQ ID NO: 4829 - protein, 8 aa, Artificial Sequence
  source: /note="Description of Artificial Sequence: Synthetic Linker"
EALPLPFA

SEQ ID NO: 4830 - protein, 8 aa, Artificial Sequence
  source: /note="Description of Artificial Sequence: Synthetic Linker"
RGVDPLGQ

SEQ ID NO: 4831 - protein, 9 aa, Artificial Sequence
  source: /note="Description of Artificial Sequence: Synthetic Linker"
LEVTPNRPD

SEQ ID NO: 4832 - protein, 9 aa, Artificial Sequence
  source: /note="Description of Artificial Sequence: Synthetic Linker"
VEDPEGAPH

SEQ ID NO: 4833 - protein, 10 aa, Artificial Sequence
  source: /note="Description of Artificial Sequence: Synthetic Linker"
AGSPKPPEAI

SEQ ID NO: 4834 - protein, 10 aa, Artificial Sequence
  source: /note="Description of Artificial Sequence: Synthetic Linker"
FGLRVAPSPL

SEQ ID NO: 4835 - protein, 13 aa, Artificial Sequence
  source: /note="Description of Artificial Sequence: Synthetic Linker"
TIPLALPAFFPAP

SEQ ID NO: 4836 - protein, 14 aa, Artificial Sequence
  source: /note="Description of Artificial Sequence: Synthetic Linker"
LGYALVEPEAALKA

SEQ ID NO: 4837 - protein, 19 aa, Artificial Sequence
  source: /note="Description of Artificial Sequence: Synthetic Linker"
LPLPDKPLAFQDPSRHPAA

SEQ ID NO: 4838 - protein, 5 aa, Artificial Sequence
  source: /note="Description of Artificial Sequence: Synthetic Linker"
GLQSA

SEQ ID NO: 4839 - protein, 6 aa, Artificial Sequence
  source: /note="Description of Artificial Sequence: Synthetic Linker"
HGELTR

SEQ ID NO: 4840 - protein, 7 aa, Artificial Sequence
  source: /note="Description of Artificial Sequence: Synthetic Linker"
LKDKQLN

SEQ ID NO: 4841 - protein, 5 aa, Artificial Sequence
  source: /note="Description of Artificial Sequence: Synthetic Linker"
FYPQY

SEQ ID NO: 4842 - protein, 7 aa, Artificial Sequence
  source: /note="Description of Artificial Sequence: Synthetic Linker"
DFHYDEK

SEQ ID NO: 4843 - protein, 10 aa, Artificial Sequence
  source: /note="Description of Artificial Sequence: Synthetic Linker"
DYLLDFSAVY

SEQ ID NO: 4844 - protein, 10 aa, Artificial Sequence
  source: /note="Description of Artificial Sequence: Synthetic Linker"
PLDVTNRPRT

SEQ ID NO: 4845 - protein, 17 aa, Artificial Sequence
  source: /note="Description of Artificial Sequence: Synthetic Linker"
NGEYSLKSAVKLPNVLS

SEQ ID NO: 4846 - protein, 6 aa, Artificial Sequence
  source: /note="Description of Artificial Sequence: Synthetic Linker"
DRRAGL

SEQ ID NO: 4847 - protein, 7 aa, Artificial Sequence
  source: /note="Description of Artificial Sequence: Synthetic Linker"
FLASMDE

SEQ ID NO: 4848 - protein, 8 aa, Artificial Sequence
  source: /note="Description of Artificial Sequence: Synthetic Linker"
IMRETINV

SEQ ID NO: 4849 - protein, 11 aa, Artificial Sequence
  source: /note="Description of Artificial Sequence: Synthetic Linker"
RFPNARTSYTM

SEQ ID NO: 4850 - protein, 6 aa, Artificial Sequence
  source: /note="Description of Artificial Sequence: Synthetic Linker"
SDPAKV

SEQ ID NO: 4851 - protein, 11 aa, Artificial Sequence
  source: /note="Description of Artificial Sequence: Synthetic Linker"
TSNGASCMPSM

SEQ ID NO: 4852 - protein, 12 aa, Artificial Sequence
  source: /note="Description of Artificial Sequence: Synthetic Linker"
AGSAPAEPTGDV

SEQ ID NO: 4853 - protein, 7 aa, Artificial Sequence
  source: /note="Description of Artificial Sequence: Synthetic Linker"
MRVKNDF

SEQ ID NO: 4854 - protein, 14 aa, Artificial Sequence
  source: /note="Description of Artificial Sequence: Synthetic Linker"
YEGKDVHIKEDERY

SEQ ID NO: 4855 - protein, 15 aa, Artificial Sequence
  source: /note="Description of Artificial Sequence: Synthetic Linker"
LGLKIIDLSAIQDEV

SEQ ID NO: 4856 - protein, 5 aa, Artificial Sequence
  source: /note="Description of Artificial Sequence: Synthetic Linker"
LEPSR

SEQ ID NO: 4857 - protein, 6 aa, Artificial Sequence
  source: /note="Description of Artificial Sequence: Synthetic Linker"
CSNVAA

SEQ ID NO: 4858 - protein, 8 aa, Artificial Sequence
  source: /note="Description of Artificial Sequence: Synthetic Linker"
QKVTINPV

SEQ ID NO: 4859 - protein, 11 aa, Artificial Sequence
  source: /note="Description of Artificial Sequence: Synthetic Linker"
ALPPGAAKQQL

SEQ ID NO: 4860 - protein, 11 aa, Artificial Sequence
  source: /note="Description of Artificial Sequence: Synthetic Linker"
ALRRGTAGSVT

SEQ ID NO: 4861 - protein, 16 aa, Artificial Sequence
  source: /note="Description of Artificial Sequence: Synthetic Linker"
ESFGATNTNARENTPF

SEQ ID NO: 4862 - protein, 4 aa, Artificial Sequence
  source: /note="Description of Artificial Sequence: Synthetic Linker"
DCDY

SEQ ID NO: 4863 - protein, 4 aa, Artificial Sequence
  source: /note="Description of Artificial Sequence: Synthetic Linker"
DWSD

SEQ ID NO: 4864 - protein, 4 aa, Artificial Sequence
  source: /note="Description of Artificial Sequence: Synthetic Linker"
FAGQ

SEQ ID NO: 4865 - protein, 4 aa, Artificial Sequence
  source: /note="Description of Artificial Sequence: Synthetic Linker"
HEGV

SEQ ID NO: 4866 - protein, 4 aa, Artificial Sequence
  source: /note="Description of Artificial Sequence: Synthetic Linker"
RDGE

SEQ ID NO: 4867 - protein, 4 aa, Artificial Sequence
  source: /note="Description of Artificial Sequence: Synthetic Linker"
SATR

SEQ ID NO: 4868 - protein, 4 aa, Artificial Sequence
  source: /note="Description of Artificial Sequence: Synthetic Linker"
SIPA

SEQ ID NO: 4869 - protein, 4 aa, Artificial Sequence
  source: /note="Description of Artificial Sequence: Synthetic Linker"
VYGQ

SEQ ID NO: 4870 - protein, 5 aa, Artificial Sequence
  source: /note="Description of Artificial Sequence: Synthetic Linker"
ACGAT

SEQ ID NO: 4871 - protein, 5 aa, Artificial Sequence
  source: /note="Description of Artificial Sequence: Synthetic Linker"
VYQAA

SEQ ID NO: 4872 - protein, 6 aa, Artificial Sequence
  source: /note="Description of Artificial Sequence: Synthetic Linker"
EAGVDR

SEQ ID NO: 4873 - protein, 6 aa, Artificial Sequence
  source: /note="Description of Artificial Sequence: Synthetic Linker"
SGGKTV

SEQ ID NO: 4874 - protein, 7 aa, Artificial Sequence
  source: /note="Description of Artificial Sequence: Synthetic Linker"
VPLSEKV

SEQ ID NO: 4875 - protein, 8 aa, Artificial Sequence
  source: /note="Description of Artificial Sequence: Synthetic Linker"
ANHPRGFA

SEQ ID NO: 4876 - protein, 9 aa, Artificial Sequence
  source: /note="Description of Artificial Sequence: Synthetic Linker"
HDLQGERPY

SEQ ID NO: 4877 - protein, 10 aa, Artificial Sequence
  source: /note="Description of Artificial Sequence: Synthetic Linker"
GCDGFHGISR

SEQ ID NO: 4878 - protein, 11 aa, Artificial Sequence
  source: /note="Description of Artificial Sequence: Synthetic Linker"
ADTPPVSHELI

SEQ ID NO: 4879 - protein, 4 aa, Artificial Sequence
  source: /note="Description of Artificial Sequence: Synthetic Linker"
GHRQ

SEQ ID NO: 4880 - protein, 4 aa, Artificial Sequence
  source: /note="Description of Artificial Sequence: Synthetic Linker"
LTGA

SEQ ID NO: 4881 - protein, 6 aa, Artificial Sequence
  source: /note="Description of Artificial Sequence: Synthetic Linker"
ALPSEL

SEQ ID NO: 4882 - protein, 6 aa, Artificial Sequence
  source: /note="Description of Artificial Sequence: Synthetic Linker"
RAGGSI

SEQ ID NO: 4883 - protein, 6 aa, Artificial Sequence
  source: /note="Description of Artificial Sequence: Synthetic Linker"
VSADNV

SEQ ID NO: 4884 - protein, 11 aa, Artificial Sequence
  source: /note="Description of Artificial Sequence: Synthetic Linker"
HTQTDTSSPDP

SEQ ID NO: 4885 - protein, 12 aa, Artificial Sequence
  source: /note="Description of Artificial Sequence: Synthetic Linker"
LKREKQDESCSL

SEQ ID NO: 4886 - protein, 13 aa, Artificial Sequence
  source: /note="Description of Artificial Sequence: Synthetic Linker"
FNPLKTGVCQLDN

SEQ ID NO: 4887 - protein, 4 aa, Artificial Sequence
  source: /note="Description of Artificial Sequence: Synthetic Linker"
ALGI

SEQ ID NO: 4888 - protein, 4 aa, Artificial Sequence
  source: /note="Description of Artificial Sequence: Synthetic Linker"
NLRS

SEQ ID NO: 4889 - protein, 6 aa, Artificial Sequence
  source: /note="Description of Artificial Sequence: Synthetic Linker"
EIPKPS

SEQ ID NO: 4890 - protein, 7 aa, Artificial Sequence
  source: /note="Description of Artificial Sequence: Synthetic Linker"
EKMVEPQ

SEQ ID NO: 4891 - protein, 10 aa, Artificial Sequence
  source: /note="Description of Artificial Sequence: Synthetic Linker"
KSKVYTRTPT

SEQ ID NO: 4892 - protein, 6 aa, Artificial Sequence
  source: /note="Description of Artificial Sequence: Synthetic Linker"
ELVPKP

SEQ ID NO: 4893 - protein, 6 aa, Artificial Sequence
  source: /note="Description of Artificial Sequence: Synthetic Linker"
FGFPGG

SEQ ID NO: 4894 - protein, 6 aa, Artificial Sequence
  source: /note="Description of Artificial Sequence: Synthetic Linker"
LRNLDE

SEQ ID NO: 4895 - protein, 7 aa, Artificial Sequence
  source: /note="Description of Artificial Sequence: Synthetic Linker"
FSNKKSW

SEQ ID NO: 4896 - protein, 7 aa, Artificial Sequence
  source: /note="Description of Artificial Sequence: Synthetic Linker"
LFEKNDF

SEQ ID NO: 4897 - protein, 7 aa, Artificial Sequence
  source: /note="Description of Artificial Sequence: Synthetic Linker"
LYPNACS

SEQ ID NO: 4898 - protein, 7 aa, Artificial Sequence
  source: /note="Description of Artificial Sequence: Synthetic Linker"
RRAVYAN

SEQ ID NO: 4899 - protein, 7 aa, Artificial Sequence
  source: /note="Description of Artificial Sequence: Synthetic Linker"
RSHRMPV

SEQ ID NO: 4900 - protein, 8 aa, Artificial Sequence
  source: /note="Description of Artificial Sequence: Synthetic Linker"
EWNWPQPV

SEQ ID NO: 4901 - protein, 16 aa, Artificial Sequence
  source: /note="Description of Artificial Sequence: Synthetic Linker"
ITPAYPSMCATHNITE

SEQ ID NO: 4902 - protein, 16 aa, Artificial Sequence
  source: /note="Description of Artificial Sequence: Synthetic Linker"
RLDQPQVPLSLTLSDK

SEQ ID NO: 4903 - protein, 21 aa, Artificial Sequence
  source: /note="Description of Artificial Sequence: Synthetic Linker"
ILKPIEDGPLQVRVWNPKIYA

SEQ ID NO: 4904 - protein, 16 aa, Artificial Sequence
  source: /note="Description of Artificial Sequence: Synthetic Linker"
ISSSMTNSTAASRPPV

SEQ ID NO: 4905 - protein, 5 aa, Artificial Sequence
  source: /note="Description of Artificial Sequence: Synthetic Linker"
ELVTV

SEQ ID NO: 4906 - protein, 11 aa, Artificial Sequence
  source: /note="Description of Artificial Sequence: Synthetic Linker"
HDDLWQTLPDP

SEQ ID NO: 4907 - protein, 4 aa, Artificial Sequence
  source: /note="Description of Artificial Sequence: Synthetic Linker"
QGTN

SEQ ID NO: 4908 - protein, 16 aa, Artificial Sequence
  source: /note="Description of Artificial Sequence: Synthetic Linker"
NVYPELRVPDHQDIAF

SEQ ID NO: 4909 - protein, 6 aa, Artificial Sequence
  source: /note="Description of Artificial Sequence: Synthetic Linker"
QLSVNQ

SEQ ID NO: 4910 - protein, 8 aa, Artificial Sequence
  source: /note="Description of Artificial Sequence: Synthetic Linker"
DKAQFRNG

SEQ ID NO: 4911 - protein, 13 aa, Artificial Sequence
  source: /note="Description of Artificial Sequence: Synthetic Linker"
ENPYRPVTFDYLM

SEQ ID NO: 4912 - protein, 27 aa, Artificial Sequence
  source: /note="Description of Artificial Sequence: Synthetic Linker"
DYGNSPLHRFKKPGSKNFQNIFPPSAT

SEQ ID NO: 4913 - protein, 10 aa, Artificial Sequence
  source: /note="Description of Artificial Sequence: Synthetic Linker"
FKPLPAQESE

SEQ ID NO: 4914 - protein, 7 aa, Artificial Sequence
  source: /note="Description of Artificial Sequence: Synthetic Linker"
KAAGLEM

SEQ ID NO: 4915 - protein, 8 aa, Artificial Sequence
  source: /note="Description of Artificial Sequence: Synthetic Linker"
EIPPQAII

SEQ ID NO: 4916 - protein, 27 aa, Artificial Sequence
  source: /note="Description of Artificial Sequence: Synthetic Linker"
ESGEPSSLPRPATHWPFKTAFQHHYLV

SEQ ID NO: 4917 - protein, 8 aa, Artificial Sequence
  source: /note="Description of Artificial Sequence: Synthetic Linker"
EVHYARPI

SEQ ID NO: 4918 - protein, 25 aa, Artificial Sequence
  source: /note="Description of Artificial Sequence: Synthetic Linker"
WSRLKAKDWGSSSGSQGREDSVLSY

SEQ ID NO: 4919 - protein, 4 aa, Artificial Sequence
  source: /note="Description of Artificial Sequence: Synthetic Linker"
LGTA

SEQ ID NO: 4920 - protein, 5 aa, Artificial Sequence
  source: /note="Description of Artificial Sequence: Synthetic Linker"
LGRRF

SEQ ID NO: 4921 - protein, 6 aa, Artificial Sequence
  source: /note="Description of Artificial Sequence: Synthetic Linker"
ANTDNT

SEQ ID NO: 4922 - protein, 6 aa, Artificial Sequence
  source: /note="Description of Artificial Sequence: Synthetic Linker"
KRTIPA

SEQ ID NO: 4923 - protein, 7 aa, Artificial Sequence
  source: /note="Description of Artificial Sequence: Synthetic Linker"
AIDDSNI

SEQ ID NO: 4924 - protein, 7 aa, Artificial Sequence
  source: /note="Description of Artificial Sequence: Synthetic Linker"
PLTKTDV

SEQ ID NO: 4925 - protein, 8 aa, Artificial Sequence
  source: /note="Description of Artificial Sequence: Synthetic Linker"
NYLVSDGI

SEQ ID NO: 4926 - protein, 9 aa, Artificial Sequence
  source: /note="Description of Artificial Sequence: Synthetic Linker"
LLDDEGFNW

SEQ ID NO: 4927 - protein, 4 aa, Artificial Sequence
  source: /note="Description of Artificial Sequence: Synthetic Linker"
TKAE

SEQ ID NO: 4928 - protein, 4 aa, Artificial Sequence
  source: /note="Description of Artificial Sequence: Synthetic Linker"
TVAV

SEQ ID NO: 4929 - protein, 4 aa, Artificial Sequence
  source: /note="Description of Artificial Sequence: Synthetic Linker"
YRTM

SEQ ID NO: 4930 - protein, 5 aa, Artificial Sequence
  source: /note="Description of Artificial Sequence: Synthetic Linker"
ARTPL

SEQ ID NO: 4931 - protein, 5 aa, Artificial Sequence
  source: /note="Description of Artificial Sequence: Synthetic Linker"
DRPDL

SEQ ID NO: 4932 - protein, 5 aa, Artificial Sequence
  source: /note="Description of Artificial Sequence: Synthetic Linker"
TGTAK

SEQ ID NO: 4933 - protein, 5 aa, Artificial Sequence
  source: /note="Description of Artificial Sequence: Synthetic Linker"
VAMQK

SEQ ID NO: 4934 - protein, 5 aa, Artificial Sequence
  source: /note="Description of Artificial Sequence: Synthetic Linker"
YNMQV

SEQ ID NO: 4935 - protein, 6 aa, Artificial Sequence
  source: /note="Description of Artificial Sequence: Synthetic Linker"
FRMYEK

SEQ ID NO: 4936 - protein, 6 aa, Artificial Sequence
  source: /note="Description of Artificial Sequence: Synthetic Linker"
QAAKST

SEQ ID NO: 4937 - protein, 7 aa, Artificial Sequence
  source: /note="Description of Artificial Sequence: Synthetic Linker"
YMTGQPV

SEQ ID NO: 4938 - protein, 8 aa, Artificial Sequence
  source: /note="Description of Artificial Sequence: Synthetic Linker"
VVEDGQVV

SEQ ID NO: 4939 - protein, 10 aa, Artificial Sequence
  source: /note="Description of Artificial Sequence: Synthetic Linker"
KEGLEIQNES

SEQ ID NO: 4940 - protein, 11 aa, Artificial Sequence
  source: /note="Description of Artificial Sequence: Synthetic Linker"
AFGIDNLFDVK

SEQ ID NO: 4941 - protein, 11 aa, Artificial Sequence
  source: /note="Description of Artificial Sequence: Synthetic Linker"
TIPTNRPVVRD

SEQ ID NO: 4942 - protein, 15 aa, Artificial Sequence
  source: /note="Description of Artificial Sequence: Synthetic Linker"
VDSFTGRLMKGRRYS

SEQ ID NO: 4943 - protein, 24 aa, Artificial Sequence
  source: /note="Description of Artificial Sequence: Synthetic Linker"
VRTLKAEKDYTYDIKTKAVQLTEE

SEQ ID NO: 4944 - protein, 12 aa, Artificial Sequence
  source: /note="Description of Artificial Sequence: Synthetic Linker"
DLPPLEEGRYYY

SEQ ID NO: 4945 - protein, 18 aa, Artificial Sequence
  source: /note="Description of Artificial Sequence: Synthetic Linker"
HGTALEHRRVVSPYGHRF

SEQ ID NO: 4946 - protein, 7 aa, Artificial Sequence
  source: /note="Description of Artificial Sequence: Synthetic Linker"
AEANVEY

SEQ ID NO: 4947 - protein, 9 aa, Artificial Sequence
  source: /note="Description of Artificial Sequence: Synthetic Linker"
IPLVTGPGV

SEQ ID NO: 4948 - protein, 4 aa, Artificial Sequence
  source: /note="Description of Artificial Sequence: Synthetic Linker"
INDV

SEQ ID NO: 4949 - protein, 4 aa, Artificial Sequence
  source: /note="Description of Artificial Sequence: Synthetic Linker"
KARL

SEQ ID NO: 4950 - protein, 5 aa, Artificial Sequence
  source: /note="Description of Artificial Sequence: Synthetic Linker"
HPEHG

SEQ ID NO: 4951 - protein, 5 aa, Artificial Sequence
  source: /note="Description of Artificial Sequence: Synthetic Linker"
YIGKP

SEQ ID NO: 4952 - protein, 7 aa, Artificial Sequence
  source: /note="Description of Artificial Sequence: Synthetic Linker"
YGYRRLR

SEQ ID NO: 4953 - protein, 8 aa, Artificial Sequence
  source: /note="Description of Artificial Sequence: Synthetic Linker"
EYLKRPLI

SEQ ID NO: 4954 - protein, 8 aa, Artificial Sequence
  source: /note="Description of Artificial Sequence: Synthetic Linker"
FADLPRKY

SEQ ID NO: 4955 - protein, 8 aa, Artificial Sequence
  source: /note="Description of Artificial Sequence: Synthetic Linker"
SGLQDVAH

SEQ ID NO: 4956 - protein, 13 aa, Artificial Sequence
  source: /note="Description of Artificial Sequence: Synthetic Linker"
VGGGLSTNPMLAQ

SEQ ID NO: 4957 - protein, 15 aa, Artificial Sequence
  source: /note="Description of Artificial Sequence: Synthetic Linker"
DDVGLQTTEACGDCP

SEQ ID NO: 4958 - protein, 16 aa, Artificial Sequence
  source: /note="Description of Artificial Sequence: Synthetic Linker"
DGPAPEPVKHPIDHVG

SEQ ID NO: 4959 - protein, 16 aa, Artificial Sequence
  source: /note="Description of Artificial Sequence: Synthetic Linker"
GSPLAGESLDEVLDPT

SEQ ID NO: 4960 - protein, 4 aa, Artificial Sequence
  source: /note="Description of Artificial Sequence: Synthetic Linker"
EVRE

SEQ ID NO: 4961 - protein, 4 aa, Artificial Sequence
  source: /note="Description of Artificial Sequence: Synthetic Linker"
HGEV

SEQ ID NO: 4962 - protein, 4 aa, Artificial Sequence
  source: /note="Description of Artificial Sequence: Synthetic Linker"
KLPP

SEQ ID NO: 4963 - protein, 6 aa, Artificial Sequence
  source: /note="Description of Artificial Sequence: Synthetic Linker"
FGREGN

SEQ ID NO: 4964 - protein, 6 aa, Artificial Sequence
  source: /note="Description of Artificial Sequence: Synthetic Linker"
LGKGSS

SEQ ID NO: 4965 - protein, 6 aa, Artificial Sequence
  source: /note="Description of Artificial Sequence: Synthetic Linker"
PFPKDV

SEQ ID NO: 4966 - protein, 6 aa, Artificial Sequence
  source: /note="Description of Artificial Sequence: Synthetic Linker"
SEHFGE

SEQ ID NO: 4967 - protein, 6 aa, Artificial Sequence
  source: /note="Description of Artificial Sequence: Synthetic Linker"
YTGVRR

SEQ ID NO: 4968 - protein, 7 aa, Artificial Sequence
  source: /note="Description of Artificial Sequence: Synthetic Linker"
DTHTLDY

SEQ ID NO: 4969 - protein, 8 aa, Artificial Sequence
  source: /note="Description of Artificial Sequence: Synthetic Linker"
ESDYEVGG

SEQ ID NO: 4970 - protein, 11 aa, Artificial Sequence
  source: /note="Description of Artificial Sequence: Synthetic Linker"
GNLPLGAGLSS

SEQ ID NO: 4971 - protein, 13 aa, Artificial Sequence
  source: /note="Description of Artificial Sequence: Synthetic Linker"
FSLNDLRKENSWI

SEQ ID NO: 4972 - protein, 9 aa, Artificial Sequence
  source: /note="Description of Artificial Sequence: Synthetic Linker"
EHGLAPPDR

SEQ ID NO: 4973 - protein, 12 aa, Artificial Sequence
  source: /note="Description of Artificial Sequence: Synthetic Linker"
AYPQTPLLPRDP

SEQ ID NO: 4974 - protein, 5 aa, Artificial Sequence
  source: /note="Description of Artificial Sequence: Synthetic Linker"
QFATV

SEQ ID NO: 4975 - protein, 4 aa, Artificial Sequence
  source: /note="Description of Artificial Sequence: Synthetic Linker"
LLTA

SEQ ID NO: 4976 - protein, 6 aa, Artificial Sequence
  source: /note="Description of Artificial Sequence: Synthetic Linker"
ARHPLL

SEQ ID NO: 4977 - protein, 6 aa, Artificial Sequence
  source: /note="Description of Artificial Sequence: Synthetic Linker"
LGGLEV

SEQ ID NO: 4978 - protein, 6 aa, Artificial Sequence
  source: /note="Description of Artificial Sequence: Synthetic Linker"
WTEGWE

SEQ ID NO: 4979 - protein, 7 aa, Artificial Sequence
  source: /note="Description of Artificial Sequence: Synthetic Linker"
YDEGLTS

SEQ ID NO: 4980 - protein, 8 aa, Artificial Sequence
  source: /note="Description of Artificial Sequence: Synthetic Linker"
TLGLRSPV

SEQ ID NO: 4981 - protein, 14 aa, Artificial Sequence
  source: /note="Description of Artificial Sequence: Synthetic Linker"
HLDLSAPKLRLREE

SEQ ID NO: 4982 - protein, 21 aa, Artificial Sequence
  source: /note="Description of Artificial Sequence: Synthetic Linker"
YATEKEEPKPERTEVVAKLRR

SEQ ID NO: 4983 - protein, 6 aa, Artificial Sequence
  source: /note="Description of Artificial Sequence: Synthetic Linker"
ELGVSL

SEQ ID NO: 4984 - protein, 6 aa, Artificial Sequence
  source: /note="Description of Artificial Sequence: Synthetic Linker"
MSSKGT

SEQ ID NO: 4985 - protein, 7 aa, Artificial Sequence
  source: /note="Description of Artificial Sequence: Synthetic Linker"
LKLGRAF

SEQ ID NO: 4986 - protein, 8 aa, Artificial Sequence
  source: /note="Description of Artificial Sequence: Synthetic Linker"
GFNIEKFP

SEQ ID NO: 4987 - protein, 15 aa, Artificial Sequence
  source: /note="Description of Artificial Sequence: Synthetic Linker"
TAPLPGYNTEFASGI

SEQ ID NO: 4988 - protein, 22 aa, Artificial Sequence
  source: /note="Description of Artificial Sequence: Synthetic Linker"
CFRNEVGLPDSSKTEKVTSETV

SEQ ID NO: 4989 - protein, 4 aa, Artificial Sequence
  source: /note="Description of Artificial Sequence: Synthetic Linker"
KSRT

SEQ ID NO: 4990 - protein, 5 aa, Artificial Sequence
  source: /note="Description of Artificial Sequence: Synthetic Linker"
DRAGA

SEQ ID NO: 4991 - protein, 5 aa, Artificial Sequence
  source: /note="Description of Artificial Sequence: Synthetic Linker"
FYVSA

SEQ ID NO: 4992 - protein, 5 aa, Artificial Sequence
  source: /note="Description of Artificial Sequence: Synthetic Linker"
IATGG

SEQ ID NO: 4993 - protein, 5 aa, Artificial Sequence
  source: /note="Description of Artificial Sequence: Synthetic Linker"
IGGGT

SEQ ID NO: 4994 - protein, 5 aa, Artificial Sequence
  source: /note="Description of Artificial Sequence: Synthetic Linker"
LFRKI

SEQ ID NO: 4995 - protein, 5 aa, Artificial Sequence
  source: /note="Description of Artificial Sequence: Synthetic Linker"
PRSLS

SEQ ID NO: 4996 - protein, 5 aa, Artificial Sequence
  source: /note="Description of Artificial Sequence: Synthetic Linker"
TGKKV

SEQ ID NO: 4997 - protein, 6 aa, Artificial Sequence
  source: /note="Description of Artificial Sequence: Synthetic Linker"
DVRGNM

SEQ ID NO: 4998 - protein, 6 aa, Artificial Sequence
  source: /note="Description of Artificial Sequence: Synthetic Linker"
LNDGSQ

SEQ ID NO: 4999 - protein, 6 aa, Artificial Sequence
  source: /note="Description of Artificial Sequence: Synthetic Linker"
NIENGG

SEQ ID NO: 5000 - protein, 6 aa, Artificial Sequence
  source: /note="Description of Artificial Sequence: Synthetic Linker"
RDPGAR

SEQ ID NO: 5001 - protein, 6 aa, Artificial Sequence
  source: /note="Description of Artificial Sequence: Synthetic Linker"
SREVKS

SEQ ID NO: 5002 - protein, 7 aa, Artificial Sequence
  source: /note="Description of Artificial Sequence: Synthetic Linker"
RQWNGKE

SEQ ID NO: 5003 - protein, 7 aa, Artificial Sequence
  source: /note="Description of Artificial Sequence: Synthetic Linker"
SIYFQPP

SEQ ID NO: 5004 - protein, 8 aa, Artificial Sequence
  source: /note="Description of Artificial Sequence: Synthetic Linker"
VPQIRAPS

SEQ ID NO: 5005 - protein, 8 aa, Artificial Sequence
  source: /note="Description of Artificial Sequence: Synthetic Linker"
WFSDDPNV

SEQ ID NO: 5006 - protein, 11 aa, Artificial Sequence
  source: /note="Description of Artificial Sequence: Synthetic Linker"
SEDPELPYMRP

SEQ ID NO: 5007 - protein, 8 aa, Artificial Sequence
  source: /note="Description of Artificial Sequence: Synthetic Linker"
AFDGPFDE

SEQ ID NO: 5008 - protein, 6 aa, Artificial Sequence
  source: /note="Description of Artificial Sequence: Synthetic Linker"
HGDDRG

SEQ ID NO: 5009 - protein, 5 aa, Artificial Sequence
  source: /note="Description of Artificial Sequence: Synthetic Linker"
LRPSP

SEQ ID NO: 5010 - protein, 4 aa, Artificial Sequence
  source: /note="Description of Artificial Sequence: Synthetic Linker"
LNVA

SEQ ID NO: 5011 - protein, 6 aa, Artificial Sequence
  source: /note="Description of Artificial Sequence: Synthetic Linker"
LSTSQK

SEQ ID NO: 5012 - protein, 21 aa, Artificial Sequence
  source: /note="Description of Artificial Sequence: Synthetic Linker"
GAADIGLGYPNGNQGWGRVTL

SEQ ID NO: 5013 - protein, 4 aa, Artificial Sequence
  source: /note="Description of Artificial Sequence: Synthetic Linker"
YIGI

SEQ ID NO: 5014 - protein, 7 aa, Artificial Sequence
  source: /note="Description of Artificial Sequence: Synthetic Linker"
DGRVIRG

SEQ ID NO: 5015 - protein, 17 aa, Artificial Sequence
  source: /note="Description of Artificial Sequence: Synthetic Linker"
TLSFDKSNDGETPEGIG

SEQ ID NO: 5016 - protein, 18 aa, Artificial Sequence
  source: /note="Description of Artificial Sequence: Synthetic Linker"
EIAPLHAQGGGIDQLQGI

SEQ ID NO: 5017 - protein, 4 aa, Artificial Sequence
  source: /note="Description of Artificial Sequence: Synthetic Linker"
ANNG

SEQ ID NO: 5018 - protein, 4 aa, Artificial Sequence
  source: /note="Description of Artificial Sequence: Synthetic Linker"
ESNL

SEQ ID NO: 5019 - protein, 4 aa, Artificial Sequence
  source: /note="Description of Artificial Sequence: Synthetic Linker"
KISA

SEQ ID NO: 5020 - protein, 4 aa, Artificial Sequence
  source: /note="Description of Artificial Sequence: Synthetic Linker"
MDSA

SEQ ID NO: 5021 - protein, 4 aa, Artificial Sequence
  source: /note="Description of Artificial Sequence: Synthetic Linker"
MMTP

SEQ ID NO: 5022 - protein, 4 aa, Artificial Sequence
  source: /note="Description of Artificial Sequence: Synthetic Linker"
VGGI

SEQ ID NO: 5023 - protein, 5 aa, Artificial Sequence
  source: /note="Description of Artificial Sequence: Synthetic Linker"
YTQRL

SEQ ID NO: 5024 - protein, 6 aa, Artificial Sequence
  source: /note="Description of Artificial Sequence: Synthetic Linker"
AEKGKA

SEQ ID NO: 5025 - protein, 6 aa, Artificial Sequence
  source: /note="Description of Artificial Sequence: Synthetic Linker"
MIRVPV

SEQ ID NO: 5026 - protein, 7 aa, Artificial Sequence
  source: /note="Description of Artificial Sequence: Synthetic Linker"
SYTATED

SEQ ID NO: 5027 - protein, 8 aa, Artificial Sequence
  source: /note="Description of Artificial Sequence: Synthetic Linker"
ETINPAHP

SEQ ID NO: 5028 - protein, 8 aa, Artificial Sequence
  source: /note="Description of Artificial Sequence: Synthetic Linker"
SKFSGGNL

SEQ ID NO: 5029 - protein, 8 aa, Artificial Sequence
  source: /note="Description of Artificial Sequence: Synthetic Linker"
TAYFVDAP

SEQ ID NO: 5030 - protein, 9 aa, Artificial Sequence
  source: /note="Description of Artificial Sequence: Synthetic Linker"
ISPKEPHNK

SEQ ID NO: 5031 - protein, 9 aa, Artificial Sequence
  source: /note="Description of Artificial Sequence: Synthetic Linker"
LSDKPGNPV

SEQ ID NO: 5032 - protein, 9 aa, Artificial Sequence
  source: /note="Description of Artificial Sequence: Synthetic Linker"
RYPSITRDM

SEQ ID NO: 5033 - protein, 10 aa, Artificial Sequence
  source: /note="Description of Artificial Sequence: Synthetic Linker"
MLSQVPYFSR

SEQ ID NO: 5034 - protein, 11 aa, Artificial Sequence
  source: /note="Description of Artificial Sequence: Synthetic Linker"
APSRYFASEPK

SEQ ID NO: 5035 - protein, 14 aa, Artificial Sequence
  source: /note="Description of Artificial Sequence: Synthetic Linker"
HTLDAVNIADRYDA

SEQ ID NO: 5036 - protein, 31 aa, Artificial Sequence
  source: /note="Description of Artificial Sequence: Synthetic Linker"
ADIALSLPELNPYIPDDFSLIKSEKKYDHPE

SEQ ID NO: 5037 - protein, 7 aa, Artificial Sequence
  source: /note="Description of Artificial Sequence: Synthetic Linker"
DVQPMQY

SEQ ID NO: 5038 - protein, 11 aa, Artificial Sequence
  source: /note="Description of Artificial Sequence: Synthetic Linker"
HMSPSWTLLKL

SEQ ID NO: 5039 - protein, 8 aa, Artificial Sequence
  source: /note="Description of Artificial Sequence: Synthetic Linker"
LEMVSKPM

SEQ ID NO: 5040 - protein, 51 aa, Artificial Sequence
  source: /note="Description of Artificial Sequence: Synthetic Linker"
YGPKGKGKGMGAGTLSTDKGESLGIKYEEGQSHRPTNPNASRMAQKVGGSD

SEQ ID NO: 5041 - protein, 5 aa, Artificial Sequence
  source: /note="Description of Artificial Sequence: Synthetic Linker"
VGQSL

SEQ ID NO: 5042 - protein, 6 aa, Artificial Sequence
  source: /note="Description of Artificial Sequence: Synthetic Linker"
VSRSST

SEQ ID NO: 5043 - protein, 12 aa, Artificial Sequence
  source: /note="Description of Artificial Sequence: Synthetic Linker"
ERNDVAPNKPDE

SEQ ID NO: 5044 - protein, 12 aa, Artificial Sequence
  source: /note="Description of Artificial Sequence: Synthetic Linker"
TETAAAADPGLS

SEQ ID NO: 5045 - protein, 14 aa, Artificial Sequence
  source: /note="Description of Artificial Sequence: Synthetic Linker"
VAESDRPELTSARR

SEQ ID NO: 5046 - protein, 4 aa, Artificial Sequence
  source: /note="Description of Artificial Sequence: Synthetic Linker"
PFYP

SEQ ID NO: 5047 - protein, 6 aa, Artificial Sequence
  source: /note="Description of Artificial Sequence: Synthetic Linker"
GVSEKP

SEQ ID NO: 5048 - protein, 9 aa, Artificial Sequence
  source: /note="Description of Artificial Sequence: Synthetic Linker"
LGMGDVASL

SEQ ID NO: 5049 - protein, 15 aa, Artificial Sequence
  source: /note="Description of Artificial Sequence: Synthetic Linker"
ALGGEARLPVLKDRN

SEQ ID NO: 5050 - protein, 17 aa, Artificial Sequence
  source: /note="Description of Artificial Sequence: Synthetic Linker"
AAGLEAEAPKSAKELSL

SEQ ID NO: 5051 - protein, 4 aa, Artificial Sequence
  source: /note="Description of Artificial Sequence: Synthetic Linker"
KGRF

SEQ ID NO: 5052 - protein, 5 aa, Artificial Sequence
  source: /note="Description of Artificial Sequence: Synthetic Linker"
KAGSL

SEQ ID NO: 5053 - protein, 6 aa, Artificial Sequence
  source: /note="Description of Artificial Sequence: Synthetic Linker"
NTGIFI

SEQ ID NO: 5054 - protein, 6 aa, Artificial Sequence
  source: /note="Description of Artificial Sequence: Synthetic Linker"
QLVKSE

SEQ ID NO: 5055 - protein, 7 aa, Artificial Sequence
  source: /note="Description of Artificial Sequence: Synthetic Linker"
KLKYVPH

SEQ ID NO: 5056 - protein, 7 aa, Artificial Sequence
  source: /note="Description of Artificial Sequence: Synthetic Linker"
LGFDEVI

SEQ ID NO: 5057 - protein, 9 aa, Artificial Sequence
  source: /note="Description of Artificial Sequence: Synthetic Linker"
MLATNLTDK

SEQ ID NO: 5058 - protein, 16 aa, Artificial Sequence
  source: /note="Description of Artificial Sequence: Synthetic Linker"
LKDHILQFVIPNRGVT

SEQ ID NO: 5059 - protein, 17 aa, Artificial Sequence
  source: /note="Description of Artificial Sequence: Synthetic Linker"
RAKGSTKFTRVPKRVYW

SEQ ID NO: 5060 - protein, 5 aa, Artificial Sequence
  source: /note="Description of Artificial Sequence: Synthetic Linker"
FQKLM

SEQ ID NO: 5061 - protein, 6 aa, Artificial Sequence
  source: /note="Description of Artificial Sequence: Synthetic Linker"
NAPTPQ

SEQ ID NO: 5062 - protein, 8 aa, Artificial Sequence
  source: /note="Description of Artificial Sequence: Synthetic Linker"
EFKEGEDA

SEQ ID NO: 5063 - protein, 6 aa, Artificial Sequence
  source: /note="Description of Artificial Sequence: Synthetic Linker"
AGTLLP

SEQ ID NO: 5064 - protein, 6 aa, Artificial Sequence
  source: /note="Description of Artificial Sequence: Synthetic Linker"
LAPYKV

SEQ ID NO: 5065 - protein, 7 aa, Artificial Sequence
  source: /note="Description of Artificial Sequence: Synthetic Linker"
ESIKDDK

SEQ ID NO: 5066 - protein, 7 aa, Artificial Sequence
  source: /note="Description of Artificial Sequence: Synthetic Linker"
FHDKPEI

SEQ ID NO: 5067 - protein, 8 aa, Artificial Sequence
  source: /note="Description of Artificial Sequence: Synthetic Linker"
ITTPKDDE

SEQ ID NO: 5068 - protein, 9 aa, Artificial Sequence
  source: /note="Description of Artificial Sequence: Synthetic Linker"
HDITPSMTP

SEQ ID NO: 5069 - protein, 10 aa, Artificial Sequence
  source: /note="Description of Artificial Sequence: Synthetic Linker"
AEATVAPVSP

SEQ ID NO: 5070 - protein, 11 aa, Artificial Sequence
  source: /note="Description of Artificial Sequence: Synthetic Linker"
IDALADKYEPS

SEQ ID NO: 5071 - protein, 4 aa, Artificial Sequence
  source: /note="Description of Artificial Sequence: Synthetic Linker"
FYGK

SEQ ID NO: 5072 - protein, 8 aa, Artificial Sequence
  source: /note="Description of Artificial Sequence: Synthetic Linker"
ALSNTGEI

SEQ ID NO: 5073 - protein, 15 aa, Artificial Sequence
  source: /note="Description of Artificial Sequence: Synthetic Linker"
TATPPGSVTVPHPNI

SEQ ID NO: 5074 - protein, 19 aa, Artificial Sequence
  source: /note="Description of Artificial Sequence: Synthetic Linker"
RSPVFTDNSSPPAVPQSFQ

SEQ ID NO: 5075 - protein, 8 aa, Artificial Sequence
  source: /note="Description of Artificial Sequence: Synthetic Linker"
IRNIDQDV

SEQ ID NO: 5076 - protein, 8 aa, Artificial Sequence
  source: /note="Description of Artificial Sequence: Synthetic Linker"
REETNLMD

SEQ ID NO: 5077 - protein, 6 aa, Artificial Sequence
  source: /note="Description of Artificial Sequence: Synthetic Linker"
HALPLV

SEQ ID NO: 5078 - protein, 6 aa, Artificial Sequence
  source: /note="Description of Artificial Sequence: Synthetic Linker"
EGRSKK

SEQ ID NO: 5079 - protein, 27 aa, Artificial Sequence
  source: /note="Description of Artificial Sequence: Synthetic Linker"
NKEKKAVSPLLLTTTNSSEGLSMGNYI

SEQ ID NO: 5080 - protein, 7 aa, Artificial Sequence
  source: /note="Description of Artificial Sequence: Synthetic Linker"
DLASGQI

SEQ ID NO: 5081 - protein, 7 aa, Artificial Sequence
  source: /note="Description of Artificial Sequence: Synthetic Linker"
TLANGAV

SEQ ID NO: 5082 - protein, 8 aa, Artificial Sequence
  source: /note="Description of Artificial Sequence: Synthetic Linker"
DYDGYNQF

SEQ ID NO: 5083 - protein, 9 aa, Artificial Sequence
  source: /note="Description of Artificial Sequence: Synthetic Linker"
DTGGAPGTV

SEQ ID NO: 5084 - protein, 9 aa, Artificial Sequence
  source: /note="Description of Artificial Sequence: Synthetic Linker"
QTNGGQFPY

SEQ ID NO: 5085 - protein, 10 aa, Artificial Sequence
  source: /note="Description of Artificial Sequence: Synthetic Linker"
TGIKGAFRTR

SEQ ID NO: 5086 - protein, 5 aa, Artificial Sequence
  source: /note="Description of Artificial Sequence: Synthetic Linker"
SLPAR

SEQ ID NO: 5087 - protein, 4 aa, Artificial Sequence
  source: /note="Description of Artificial Sequence: Synthetic Linker"
IYPD

SEQ ID NO: 5088 - protein, 4 aa, Artificial Sequence
  source: /note="Description of Artificial Sequence: Synthetic Linker"
KCAV

SEQ ID NO: 5089 - protein, 4 aa, Artificial Sequence
  source: /note="Description of Artificial Sequence: Synthetic Linker"
MAPK

SEQ ID NO: 5090 - protein, 4 aa, Artificial Sequence
  source: /note="Description of Artificial Sequence: Synthetic Linker"
TESL

SEQ ID NO: 5091 - protein, 5 aa, Artificial Sequence
  source: /note="Description of Artificial Sequence: Synthetic Linker"
ASADQ

SEQ ID NO: 5092 - protein, 10 aa, Artificial Sequence
  source: /note="Description of Artificial Sequence: Synthetic Linker"
YTLRQPPPAT

SEQ ID NO: 5093 - protein, 11 aa, Artificial Sequence
  source: /note="Description of Artificial Sequence: Synthetic Linker"
DQSDPNDPKSR

SEQ ID NO: 5094 - protein, 24 aa, Artificial Sequence
  source: /note="Description of Artificial Sequence: Synthetic Linker"
SLHDMADEAGLPVQTEDGEATGTI

SEQ ID NO: 5095 - protein, 5 aa, Artificial Sequence
  source: /note="Description of Artificial Sequence: Synthetic Linker"
DGIEE

SEQ ID NO: 5096 - protein, 6 aa, Artificial Sequence
  source: /note="Description of Artificial Sequence: Synthetic Linker"
VEHLPK

SEQ ID NO: 5097 - protein, 4 aa, Artificial Sequence
  source: /note="Description of Artificial Sequence: Synthetic Linker"
QAHS

SEQ ID NO: 5098 - protein, 7 aa, Artificial Sequence
  source: /note="Description of Artificial Sequence: Synthetic Linker"
AKEAFVS

SEQ ID NO: 5099 - protein, 9 aa, Artificial Sequence
  source: /note="Description of Artificial Sequence: Synthetic Linker"
QGILLHRSR

SEQ ID NO: 5100 - protein, 4 aa, Artificial Sequence
  source: /note="Description of Artificial Sequence: Synthetic Linker"
ESEY

SEQ ID NO: 5101 - protein, 5 aa, Artificial Sequence
  source: /note="Description of Artificial Sequence: Synthetic Linker"
DGPTP

SEQ ID NO: 5102 - protein, 8 aa, Artificial Sequence
  source: /note="Description of Artificial Sequence: Synthetic Linker"
VGSEKVSK

SEQ ID NO: 5103 - protein, 4 aa, Artificial Sequence
  source: /note="Description of Artificial Sequence: Synthetic Linker"
IGQS

SEQ ID NO: 5104 - protein, 15 aa, Artificial Sequence
  source: /note="Description of Artificial Sequence: Synthetic Linker"
VSNINNTVSPSSASF

SEQ ID NO: 5105 - protein, 16 aa, Artificial Sequence
  source: /note="Description of Artificial Sequence: Synthetic Linker"
ALPTNARPLLPPISNP

SEQ ID NO: 5106 - protein, 8 aa, Artificial Sequence
  source: /note="Description of Artificial Sequence: Synthetic Linker"
VRERPVPR

SEQ ID NO: 5107 - protein, 9 aa, Artificial Sequence
  source: /note="Description of Artificial Sequence: Synthetic Linker"
EQADGAVRG

SEQ ID NO: 5108 - protein, 13 aa, Artificial Sequence
  source: /note="Description of Artificial Sequence: Synthetic Linker"
ARSGYRPDSGATP

SEQ ID NO: 5109 - protein, 8 aa, Artificial Sequence
  source: /note="Description of Artificial Sequence: Synthetic Linker"
PDIDKLGY

SEQ ID NO: 5110 - protein, 5 aa, Artificial Sequence
  source: /note="Description of Artificial Sequence: Synthetic Linker"
LGYSM

SEQ ID NO: 5111 - protein, 13 aa, Artificial Sequence
  source: /note="Description of Artificial Sequence: Synthetic Linker"
SGVIKKFTAIIDP

SEQ ID NO: 5112 - protein, 6 aa, Artificial Sequence
  source: /note="Description of Artificial Sequence: Synthetic Linker"
RTSRQL

SEQ ID NO: 5113 - protein, 4 aa, Artificial Sequence
  source: /note="Description of Artificial Sequence: Synthetic Linker"
SGCK

SEQ ID NO: 5114 - protein, 5 aa, Artificial Sequence
  source: /note="Description of Artificial Sequence: Synthetic Linker"
VSTGV

SEQ ID NO: 5115 - protein, 10 aa, Artificial Sequence
  source: /note="Description of Artificial Sequence: Synthetic Linker"
QALDGDITDM

SEQ ID NO: 5116 - protein, 8 aa, Artificial Sequence
  source: /note="Description of Artificial Sequence: Synthetic Linker"
HTAGSIPM

SEQ ID NO: 5117 - protein, 8 aa, Artificial Sequence
  source: /note="Description of Artificial Sequence: Synthetic Linker"
WEGHVPHY

SEQ ID NO: 5118 - protein, 9 aa, Artificial Sequence
  source: /note="Description of Artificial Sequence: Synthetic Linker"
VEGKREEAL

SEQ ID NO: 5119 - protein, 13 aa, Artificial Sequence
  source: /note="Description of Artificial Sequence: Synthetic Linker"
PMQTFSKQREVDF

SEQ ID NO: 5120 - protein, 10 aa, Artificial Sequence
  source: /note="Description of Artificial Sequence: Synthetic Linker"
VYFNERINVD

SEQ ID NO: 5121 - protein, 6 aa, Artificial Sequence
  source: /note="Description of Artificial Sequence: Synthetic Linker"
SGGPAT

SEQ ID NO: 5122 - protein, 8 aa, Artificial Sequence
  source: /note="Description of Artificial Sequence: Synthetic Linker"
YAATSTGR

SEQ ID NO: 5123 - protein, 9 aa, Artificial Sequence
  source: /note="Description of Artificial Sequence: Synthetic Linker"
TGGTEAAGG

SEQ ID NO: 5124 - protein, 6 aa, Artificial Sequence
  source: /note="Description of Artificial Sequence: Synthetic Linker"
FDPTEF

SEQ ID NO: 5125 - protein, 7 aa, Artificial Sequence
  source: /note="Description of Artificial Sequence: Synthetic Linker"
VDLDFNR

SEQ ID NO: 5126 - protein, 10 aa, Artificial Sequence
  source: /note="Description of Artificial Sequence: Synthetic Linker"
SNDAGFAMTS

SEQ ID NO: 5127 - protein, 11 aa, Artificial Sequence
  source: /note="Description of Artificial Sequence: Synthetic Linker"
NGFDPATGDLS

SEQ ID NO: 5128 - protein, 8 aa, Artificial Sequence
  source: /note="Description of Artificial Sequence: Synthetic Linker"
FSQPAPDR

SEQ ID NO: 5129 - protein, 5 aa, Artificial Sequence
  source: /note="Description of Artificial Sequence: Synthetic Linker"
CQPNE

SEQ ID NO: 5130 - protein, 5 aa, Artificial Sequence
  source: /note="Description of Artificial Sequence: Synthetic Linker"
KGVPC

SEQ ID NO: 5131 - protein, 5 aa, Artificial Sequence
  source: /note="Description of Artificial Sequence: Synthetic Linker"
PFITE

SEQ ID NO: 5132 - protein, 6 aa, Artificial Sequence
  source: /note="Description of Artificial Sequence: Synthetic Linker"
SIPTCE

SEQ ID NO: 5133 - protein, 6 aa, Artificial Sequence
  source: /note="Description of Artificial Sequence: Synthetic Linker"
VEEHNI

SEQ ID NO: 5134 - protein, 7 aa, Artificial Sequence
  source: /note="Description of Artificial Sequence: Synthetic Linker"
SNKEVIQ

SEQ ID NO: 5135 - protein, 7 aa, Artificial Sequence
  source: /note="Description of Artificial Sequence: Synthetic Linker"
TAKGDTK

SEQ ID NO: 5136 - protein, 9 aa, Artificial Sequence
  source: /note="Description of Artificial Sequence: Synthetic Linker"
GRWYPAFAD

SEQ ID NO: 5137 - protein, 16 aa, Artificial Sequence
  source: /note="Description of Artificial Sequence: Synthetic Linker"
IFYDFLHVNVIPTVSF

SEQ ID NO: 5138 - protein, 5 aa, Artificial Sequence
  source: /note="Description of Artificial Sequence: Synthetic Linker"
PGPAS

SEQ ID NO: 5139 - protein, 7 aa, Artificial Sequence
  source: /note="Description of Artificial Sequence: Synthetic Linker"
KVSKKTG

SEQ ID NO: 5140 - protein, 8 aa, Artificial Sequence
  source: /note="Description of Artificial Sequence: Synthetic Linker"
ACNIASMP

SEQ ID NO: 5141 - protein, 8 aa, Artificial Sequence
  source: /note="Description of Artificial Sequence: Synthetic Linker"
FNDEASDE

SEQ ID NO: 5142 - protein, 18 aa, Artificial Sequence
  source: /note="Description of Artificial Sequence: Synthetic Linker"
SLNAGELKKAAPADPSAP

SEQ ID NO: 5143 - protein, 10 aa, Artificial Sequence
  source: /note="Description of Artificial Sequence: Synthetic Linker"
DKYYMASPDL

SEQ ID NO: 5144 - protein, 10 aa, Artificial Sequence
  source: /note="Description of Artificial Sequence: Synthetic Linker"
NATNATQPIH

SEQ ID NO: 5145 - protein, 4 aa, Artificial Sequence
  source: /note="Description of Artificial Sequence: Synthetic Linker"
EFPP

SEQ ID NO: 5146 - protein, 9 aa, Artificial Sequence
  source: /note="Description of Artificial Sequence: Synthetic Linker"
ENELMYGVP

SEQ ID NO: 5147 - protein, 13 aa, Artificial Sequence
  source: /note="Description of Artificial Sequence: Synthetic Linker"
QSKDFLIPIGKAK

SEQ ID NO: 5148 - protein, 4 aa, Artificial Sequence
  source: /note="Description of Artificial Sequence: Synthetic Linker"
AGEV

SEQ ID NO: 5149 - protein, 4 aa, Artificial Sequence
  source: /note="Description of Artificial Sequence: Synthetic Linker"
LHPT

SEQ ID NO: 5150 - protein, 4 aa, Artificial Sequence
  source: /note="Description of Artificial Sequence: Synthetic Linker"
RIEA

SEQ ID NO: 5151 - protein, 4 aa, Artificial Sequence
  source: /note="Description of Artificial Sequence: Synthetic Linker"
SPGA

SEQ ID NO: 5152 - protein, 4 aa, Artificial Sequence
  source: /note="Description of Artificial Sequence: Synthetic Linker"
YFTA

SEQ ID NO: 5153 - protein, 6 aa, Artificial Sequence
  source: /note="Description of Artificial Sequence: Synthetic Linker"
DGSTGK

SEQ ID NO: 5154 - protein, 6 aa, Artificial Sequence
  source: /note="Description of Artificial Sequence: Synthetic Linker"
EKGERV

SEQ ID NO: 5155 - protein, 6 aa, Artificial Sequence
  source: /note="Description of Artificial Sequence: Synthetic Linker"
KGDIET

SEQ ID NO: 5156 - protein, 7 aa, Artificial Sequence
  source: /note="Description of Artificial Sequence: Synthetic Linker"
DEGMITE

SEQ ID NO: 5157 - protein, 7 aa, Artificial Sequence
  source: /note="Description of Artificial Sequence: Synthetic Linker"
QEASVSG

SEQ ID NO: 5158 - protein, 4 aa, Artificial Sequence
  source: /note="Description of Artificial Sequence: Synthetic Linker"
EAAN

SEQ ID NO: 5159 - protein, 4 aa, Artificial Sequence
  source: /note="Description of Artificial Sequence: Synthetic Linker"
RYGL

SEQ ID NO: 5160 - protein, 5 aa, Artificial Sequence
  source: /note="Description of Artificial Sequence: Synthetic Linker"
EVLDY

SEQ ID NO: 5161 - protein, 5 aa, Artificial Sequence
  source: /note="Description of Artificial Sequence: Synthetic Linker"
RPFVS

SEQ ID NO: 5162 - protein, 5 aa, Artificial Sequence
  source: /note="Description of Artificial Sequence: Synthetic Linker"
SLVNQ

SEQ ID NO: 5163 - protein, 5 aa, Artificial Sequence
  source: /note="Description of Artificial Sequence: Synthetic Linker"
SMGSS

SEQ ID NO: 5164 - protein, 6 aa, Artificial Sequence
  source: /note="Description of Artificial Sequence: Synthetic Linker"
SKEFSP

SEQ ID NO: 5165 - protein, 7 aa, Artificial Sequence
  source: /note="Description of Artificial Sequence: Synthetic Linker"
AAKGEKI

SEQ ID NO: 5166 - protein, 7 aa, Artificial Sequence
  source: /note="Description of Artificial Sequence: Synthetic Linker"
GAPDAER

SEQ ID NO: 5167 - protein, 7 aa, Artificial Sequence
  source: /note="Description of Artificial Sequence: Synthetic Linker"
RGEAMPK

SEQ ID NO: 5168 - protein, 8 aa, Artificial Sequence
  source: /note="Description of Artificial Sequence: Synthetic Linker"
SGAKKNHF

SEQ ID NO: 5169 - protein, 8 aa, Artificial Sequence
  source: /note="Description of Artificial Sequence: Synthetic Linker"
TGRSYKLF

SEQ ID NO: 5170 - protein, 9 aa, Artificial Sequence
  source: /note="Description of Artificial Sequence: Synthetic Linker"
AALPASAKV

SEQ ID NO: 5171 - protein, 9 aa, Artificial Sequence
  source: /note="Description of Artificial Sequence: Synthetic Linker"
DGFRTSHEI

SEQ ID NO: 5172 - protein, 10 aa, Artificial Sequence
  source: /note="Description of Artificial Sequence: Synthetic Linker"
KSMNPEHPHV

SEQ ID NO: 5173 - protein, 10 aa, Artificial Sequence
  source: /note="Description of Artificial Sequence: Synthetic Linker"
RGTAQNPDIY

SEQ ID NO: 5174 - protein, 11 aa, Artificial Sequence
  source: /note="Description of Artificial Sequence: Synthetic Linker"
WVPENCIQCNQ

SEQ ID NO: 5175 - protein, 12 aa, Artificial Sequence
  source: /note="Description of Artificial Sequence: Synthetic Linker"
DRTKEPGAPGDP

SEQ ID NO: 5176 - protein, 28 aa, Artificial Sequence
  source: /note="Description of Artificial Sequence: Synthetic Linker"
TVGIEDDVTGTSLPVDNAFADTTPKGTI

SEQ ID NO: 5177 - protein, 4 aa, Artificial Sequence
  source: /note="Description of Artificial Sequence: Synthetic Linker"
AGED

SEQ ID NO: 5178 - protein, 4 aa, Artificial Sequence
  source: /note="Description of Artificial Sequence: Synthetic Linker"
DADS

SEQ ID NO: 5179 - protein, 4 aa, Artificial Sequence
  source: /note="Description of Artificial Sequence: Synthetic Linker"
DGTV

SEQ ID NO: 5180 - protein, 4 aa, Artificial Sequence
  source: /note="Description of Artificial Sequence: Synthetic Linker"
QDGR

SEQ ID NO: 5181 - protein, 5 aa, Artificial Sequence
  source: /note="Description of Artificial Sequence: Synthetic Linker"
LGAGE

SEQ ID NO: 5182 - protein, 5 aa, Artificial Sequence
  source: /note="Description of Artificial Sequence: Synthetic Linker"
QPGRG

SEQ ID NO: 5183 - protein, 6 aa, Artificial Sequence
  source: /note="Description of Artificial Sequence: Synthetic Linker"
DFADGS

SEQ ID NO: 5184 - protein, 6 aa, Artificial Sequence
  source: /note="Description of Artificial Sequence: Synthetic Linker"
YDRPDR

SEQ ID NO: 5185 - protein, 7 aa, Artificial Sequence
  source: /note="Description of Artificial Sequence: Synthetic Linker"
KADAAPQ

SEQ ID NO: 5186 - protein, 15 aa, Artificial Sequence
  source: /note="Description of Artificial Sequence: Synthetic Linker"
PLGEAPDAYADDASG

SEQ ID NO: 5187 - protein, 4 aa, Artificial Sequence
  source: /note="Description of Artificial Sequence: Synthetic Linker"
PCFP

SEQ ID NO: 5188 - protein, 7 aa, Artificial Sequence
  source: /note="Description of Artificial Sequence: Synthetic Linker"
DLESPVK

SEQ ID NO: 5189 - protein, 7 aa, Artificial Sequence
  source: /note="Description of Artificial Sequence: Synthetic Linker"
FLRIQNV

SEQ ID NO: 5190 - protein, 10 aa, Artificial Sequence
  source: /note="Description of Artificial Sequence: Synthetic Linker"
LGHPCTRTPH

SEQ ID NO: 5191 - protein, 6 aa, Artificial Sequence
  source: /note="Description of Artificial Sequence: Synthetic Linker"
HFPKTF

SEQ ID NO: 5192 - protein, 7 aa, Artificial Sequence
  source: /note="Description of Artificial Sequence: Synthetic Linker"
RKLLGVK

SEQ ID NO: 5193 - protein, 7 aa, Artificial Sequence
  source: /note="Description of Artificial Sequence: Synthetic Linker"
SATPIPR

SEQ ID NO: 5194 - protein, 8 aa, Artificial Sequence
  source: /note="Description of Artificial Sequence: Synthetic Linker"
FYGDLDVT

SEQ ID NO: 5195 - protein, 8 aa, Artificial Sequence
  source: /note="Description of Artificial Sequence: Synthetic Linker"
SLPFKLTN

SEQ ID NO: 5196 - protein, 9 aa, Artificial Sequence
  source: /note="Description of Artificial Sequence: Synthetic Linker"
CSLKETLPE

SEQ ID NO: 5197 - protein, 9 aa, Artificial Sequence
  source: /note="Description of Artificial Sequence: Synthetic Linker"
ISEKPMNRL

SEQ ID NO: 5198 - protein, 9 aa, Artificial Sequence
  source: /note="Description of Artificial Sequence: Synthetic Linker"
TMLVPMDRV

SEQ ID NO: 5199 - protein, 10 aa, Artificial Sequence
  source: /note="Description of Artificial Sequence: Synthetic Linker"
IYRLTSGISQ

SEQ ID NO: 5200 - protein, 11 aa, Artificial Sequence
  source: /note="Description of Artificial Sequence: Synthetic Linker"
HGGIPKKIEGK

SEQ ID NO: 5201 - protein, 12 aa, Artificial Sequence
  source: /note="Description of Artificial Sequence: Synthetic Linker"
IDEMPPGRKEVQ

SEQ ID NO: 5202 - protein, 12 aa, Artificial Sequence
  source: /note="Description of Artificial Sequence: Synthetic Linker"
TPKEGEYVRRIL

SEQ ID NO: 5203 - protein, 9 aa, Artificial Sequence
  source: /note="Description of Artificial Sequence: Synthetic Linker"
KSDYTQNNI

SEQ ID NO: 5204 - protein, 15 aa, Artificial Sequence
  source: /note="Description of Artificial Sequence: Synthetic Linker"
EGMGPVLAPVTPVPV

SEQ ID NO: 5205 - protein, 7 aa, Artificial Sequence
  source: /note="Description of Artificial Sequence: Synthetic Linker"
MLNQNWH

SEQ ID NO: 5206 - protein, 10 aa, Artificial Sequence
  source: /note="Description of Artificial Sequence: Synthetic Linker"
NMTNATDASP

SEQ ID NO: 5207 - protein, 14 aa, Artificial Sequence
  source: /note="Description of Artificial Sequence: Synthetic Linker"
LLYDERTTNLTLDE

SEQ ID NO: 5208 - protein, 6 aa, Artificial Sequence
  source: /note="Description of Artificial Sequence: Synthetic Linker"
EAGYPG

SEQ ID NO: 5209 - protein, 7 aa, Artificial Sequence
  source: /note="Description of Artificial Sequence: Synthetic Linker"
LFDSLSP

SEQ ID NO: 5210 - protein, 7 aa, Artificial Sequence
  source: /note="Description of Artificial Sequence: Synthetic Linker"
TREGKST

SEQ ID NO: 5211 - protein, 5 aa, Artificial Sequence
  source: /note="Description of Artificial Sequence: Synthetic Linker"
AEGDM

SEQ ID NO: 5212 - protein, 6 aa, Artificial Sequence
  source: /note="Description of Artificial Sequence: Synthetic Linker"
AALDKK

SEQ ID NO: 5213 - protein, 6 aa, Artificial Sequence
  source: /note="Description of Artificial Sequence: Synthetic Linker"
ENEGLE

SEQ ID NO: 5214 - protein, 7 aa, Artificial Sequence
  source: /note="Description of Artificial Sequence: Synthetic Linker"
RFRPLRD

SEQ ID NO: 5215 - protein, 7 aa, Artificial Sequence
  source: /note="Description of Artificial Sequence: Synthetic Linker"
VASRARP

SEQ ID NO: 5216 - protein, 4 aa, Artificial Sequence
  source: /note="Description of Artificial Sequence: Synthetic Linker"
TKNI

SEQ ID NO: 5217 - protein, 6 aa, Artificial Sequence
  source: /note="Description of Artificial Sequence: Synthetic Linker"
VSAGST

SEQ ID NO: 5218 - protein, 9 aa, Artificial Sequence
  source: /note="Description of Artificial Sequence: Synthetic Linker"
SGSVKTGTT

SEQ ID NO: 5219 - protein, 10 aa, Artificial Sequence
  source: /note="Description of Artificial Sequence: Synthetic Linker"
DLDIKGYVAA

SEQ ID NO: 5220 - protein, 13 aa, Artificial Sequence
  source: /note="Description of Artificial Sequence: Synthetic Linker"
SRSGTPSTSIDTS

SEQ ID NO: 5221 - protein, 9 aa, Artificial Sequence
  source: /note="Description of Artificial Sequence: Synthetic Linker"
CDGDEYKPV

SEQ ID NO: 5222 - protein, 14 aa, Artificial Sequence
  source: /note="Description of Artificial Sequence: Synthetic Linker"
DGPCEPDEDEDVCQ

SEQ ID NO: 5223 - protein, 14 aa, Artificial Sequence
  source: /note="Description of Artificial Sequence: Synthetic Linker"
RAVLSSTRMGGHFV

SEQ ID NO: 5224 - protein, 4 aa, Artificial Sequence
  source: /note="Description of Artificial Sequence: Synthetic Linker"
QLRT

SEQ ID NO: 5225 - protein, 5 aa, Artificial Sequence
  source: /note="Description of Artificial Sequence: Synthetic Linker"
DITNA

SEQ ID NO: 5226 - protein, 6 aa, Artificial Sequence
  source: /note="Description of Artificial Sequence: Synthetic Linker"
QEVVAP

SEQ ID NO: 5227 - protein, 4 aa, Artificial Sequence
  source: /note="Description of Artificial Sequence: Synthetic Linker"
ILGE

SEQ ID NO: 5228 - protein, 5 aa, Artificial Sequence
  source: /note="Description of Artificial Sequence: Synthetic Linker"
SQGGK

SEQ ID NO: 5229 - protein, 6 aa, Artificial Sequence
  source: /note="Description of Artificial Sequence: Synthetic Linker"
IARPPA

SEQ ID NO: 5230 - protein, 7 aa, Artificial Sequence
  source: /note="Description of Artificial Sequence: Synthetic Linker"
PTFAVER

SEQ ID NO: 5231 - protein, 12 aa, Artificial Sequence
  source: /note="Description of Artificial Sequence: Synthetic Linker"
EGTYGDRPHRPY

SEQ ID NO: 5232 - protein, 24 aa, Artificial Sequence
  source: /note="Description of Artificial Sequence: Synthetic Linker"
YSGDLGNREKDVLPDPSLPPLADL

SEQ ID NO: 5233 - protein, 4 aa, Artificial Sequence
  source: /note="Description of Artificial Sequence: Synthetic Linker"
DYTE

SEQ ID NO: 5234 - protein, 4 aa, Artificial Sequence
  source: /note="Description of Artificial Sequence: Synthetic Linker"
TFSY

SEQ ID NO: 5235 - protein, 6 aa, Artificial Sequence
  source: /note="Description of Artificial Sequence: Synthetic Linker"
DTFIDH

SEQ ID NO: 5236 - protein, 8 aa, Artificial Sequence
  source: /note="Description of Artificial Sequence: Synthetic Linker"
EMGKYDNH

SEQ ID NO: 5237 - protein, 9 aa, Artificial Sequence
  source: /note="Description of Artificial Sequence: Synthetic Linker"
YGQFEPPAL

SEQ ID NO: 5238 - protein, 16 aa, Artificial Sequence
  source: /note="Description of Artificial Sequence: Synthetic Linker"
KYLVQNRVTGEIYESA

SEQ ID NO: 5239 - protein, 13 aa, Artificial Sequence
  source: /note="Description of Artificial Sequence: Synthetic Linker"
DLSVFPELEEGDY

SEQ ID NO: 5240 - protein, 9 aa, Artificial Sequence
  source: /note="Description of Artificial Sequence: Synthetic Linker"
DYGFIEPNE

SEQ ID NO: 5241 - protein, 6 aa, Artificial Sequence
  source: /note="Description of Artificial Sequence: Synthetic Linker"
KSGEDI

SEQ ID NO: 5242 - protein, 29 aa, Artificial Sequence
  source: /note="Description of Artificial Sequence: Synthetic Linker"
INQGEDSVPAKKFKAAPAEISDGEDRSKC

SEQ ID NO: 5243 - protein, 5 aa, Artificial Sequence
  source: /note="Description of Artificial Sequence: Synthetic Linker"
RSPEW

SEQ ID NO: 5244 - protein, 19 aa, Artificial Sequence
  source: /note="Description of Artificial Sequence: Synthetic Linker"
SAFGIRPPLRLGEFTMPEH

SEQ ID NO: 5245 - protein, 12 aa, Artificial Sequence
  source: /note="Description of Artificial Sequence: Synthetic Linker"
LNTGASDNFTRW

SEQ ID NO: 5246 - protein, 12 aa, Artificial Sequence
  source: /note="Description of Artificial Sequence: Synthetic Linker"
AEKGEDIEIKKV

SEQ ID NO: 5247 - protein, 15 aa, Artificial Sequence
  source: /note="Description of Artificial Sequence: Synthetic Linker"
VDRADPLEQGAGDQG

SEQ ID NO: 5248 - protein, 4 aa, Artificial Sequence
  source: /note="Description of Artificial Sequence: Synthetic Linker"
DGDF

SEQ ID NO: 5249 - protein, 4 aa, Artificial Sequence
  source: /note="Description of Artificial Sequence: Synthetic Linker"
KNDK

SEQ ID NO: 5250 - protein, 4 aa, Artificial Sequence
  source: /note="Description of Artificial Sequence: Synthetic Linker"
PIRS

SEQ ID NO: 5251 - protein, 4 aa, Artificial Sequence
  source: /note="Description of Artificial Sequence: Synthetic Linker"
PMTG

SEQ ID NO: 5252 - protein, 4 aa, Artificial Sequence
  source: /note="Description of Artificial Sequence: Synthetic Linker"
RACC

SEQ ID NO: 5253 - protein, 4 aa, Artificial Sequence
  source: /note="Description of Artificial Sequence: Synthetic Linker"
VGTT

SEQ ID NO: 5254 - protein, 5 aa, Artificial Sequence
  source: /note="Description of Artificial Sequence: Synthetic Linker"
DAGIR

SEQ ID NO: 5255 - protein, 5 aa, Artificial Sequence
  source: /note="Description of Artificial Sequence: Synthetic Linker"
DDLPL

SEQ ID NO: 5256 - protein, 5 aa, Artificial Sequence
  source: /note="Description of Artificial Sequence: Synthetic Linker"
GCTSV

SEQ ID NO: 5257 - protein, 5 aa, Artificial Sequence
  source: /note="Description of Artificial Sequence: Synthetic Linker"
ITAFV

SEQ ID NO: 5258 - protein, 5 aa, Artificial Sequence
  source: /note="Description of Artificial Sequence: Synthetic Linker"
TASEM

SEQ ID NO: 5259 - protein, 5 aa, Artificial Sequence
  source: /note="Description of Artificial Sequence: Synthetic Linker"
TGDNK

SEQ ID NO: 5260 - protein, 5 aa, Artificial Sequence
  source: /note="Description of Artificial Sequence: Synthetic Linker"
YETDL

SEQ ID NO: 5261 - protein, 6 aa, Artificial Sequence
  source: /note="Description of Artificial Sequence: Synthetic Linker"
LADDNF

SEQ ID NO: 5262 - protein, 6 aa, Artificial Sequence
  source: /note="Description of Artificial Sequence: Synthetic Linker"
MGSGTA

SEQ ID NO: 5263 - protein, 7 aa, Artificial Sequence
  source: /note="Description of Artificial Sequence: Synthetic Linker"
ARVEPSH

SEQ ID NO: 5264 - protein, 7 aa, Artificial Sequence
  source: /note="Description of Artificial Sequence: Synthetic Linker"
EMVLDDS

SEQ ID NO: 5265 - protein, 7 aa, Artificial Sequence
  source: /note="Description of Artificial Sequence: Synthetic Linker"
RDTPPKR

SEQ ID NO: 5266 - protein, 7 aa, Artificial Sequence
  source: /note="Description of Artificial Sequence: Synthetic Linker"
TGRDTLR

SEQ ID NO: 5267 - protein, 8 aa, Artificial Sequence
  source: /note="Description of Artificial Sequence: Synthetic Linker"
LDPPRKEV

SEQ ID NO: 5268 - protein, 9 aa, Artificial Sequence
  source: /note="Description of Artificial Sequence: Synthetic Linker"
LAWFEEGEE

SEQ ID NO: 5269 - protein, 10 aa, Artificial Sequence
  source: /note="Description of Artificial Sequence: Synthetic Linker"
ALGLPEALIP

SEQ ID NO: 5270 - protein, 12 aa, Artificial Sequence
  source: /note="Description of Artificial Sequence: Synthetic Linker"
DKTGTLTTNQMS

SEQ ID NO: 5271 - protein, 12 aa, Artificial Sequence
  source: /note="Description of Artificial Sequence: Synthetic Linker"
ITGSTYAPEGEV

SEQ ID NO: 5272 - protein, 14 aa, Artificial Sequence
  source: /note="Description of Artificial Sequence: Synthetic Linker"
IGIFGENEEVADRA

SEQ ID NO: 5273 - protein, 6 aa, Artificial Sequence
  source: /note="Description of Artificial Sequence: Synthetic Linker"
YLRQDL

SEQ ID NO: 5274 - protein, 8 aa, Artificial Sequence
  source: /note="Description of Artificial Sequence: Synthetic Linker"
ESQSLSIQ

SEQ ID NO: 5275 - protein, 6 aa, Artificial Sequence
  source: /note="Description of Artificial Sequence: Synthetic Linker"
SGKQSY

SEQ ID NO: 5276 - protein, 14 aa, Artificial Sequence
  source: /note="Description of Artificial Sequence: Synthetic Linker"
FRARGKAVSTVFDQ

SEQ ID NO: 5277 - protein, 6 aa, Artificial Sequence
  source: /note="Description of Artificial Sequence: Synthetic Linker"
DANSEM

SEQ ID NO: 5278 - protein, 7 aa, Artificial Sequence
  source: /note="Description of Artificial Sequence: Synthetic Linker"
DITAQKE

SEQ ID NO: 5279 - protein, 8 aa, Artificial Sequence
  source: /note="Description of Artificial Sequence: Synthetic Linker"
TVESTGKV

SEQ ID NO: 5280 - protein, 5 aa, Artificial Sequence
  source: /note="Description of Artificial Sequence: Synthetic Linker"
AQDRK

SEQ ID NO: 5281 - protein, 8 aa, Artificial Sequence
  source: /note="Description of Artificial Sequence: Synthetic Linker"
ALSSTGEI

SEQ ID NO: 5282 - protein, 17 aa, Artificial Sequence
  source: /note="Description of Artificial Sequence: Synthetic Linker"
LLQVPLPPWPGAPVGGE

SEQ ID NO: 5283 - protein, 6 aa, Artificial Sequence
  source: /note="Description of Artificial Sequence: Synthetic Linker"
FRGPDR

SEQ ID NO: 5284 - protein, 4 aa, Artificial Sequence
  source: /note="Description of Artificial Sequence: Synthetic Linker"
EGGK

SEQ ID NO: 5285 - protein, 6 aa, Artificial Sequence
  source: /note="Description of Artificial Sequence: Synthetic Linker"
INDKYE

SEQ ID NO: 5286 - protein, 6 aa, Artificial Sequence
  source: /note="Description of Artificial Sequence: Synthetic Linker"
NETTNK

SEQ ID NO: 5287 - protein, 8 aa, Artificial Sequence
  source: /note="Description of Artificial Sequence: Synthetic Linker"
DFDSGSLR

SEQ ID NO: 5288 - protein, 9 aa, Artificial Sequence
  source: /note="Description of Artificial Sequence: Synthetic Linker"
KNGDNDFRY

SEQ ID NO: 5289 - protein, 11 aa, Artificial Sequence
  source: /note="Description of Artificial Sequence: Synthetic Linker"
PMNVFYKDSLF

SEQ ID NO: 5290 - protein, 4 aa, Artificial Sequence
  source: /note="Description of Artificial Sequence: Synthetic Linker"
GGEA

SEQ ID NO: 5291 - protein, 4 aa, Artificial Sequence
  source: /note="Description of Artificial Sequence: Synthetic Linker"
LGDV

SEQ ID NO: 5292 - protein, 5 aa, Artificial Sequence
  source: /note="Description of Artificial Sequence: Synthetic Linker"
YSNVE

SEQ ID NO: 5293 - protein, 6 aa, Artificial Sequence
  source: /note="Description of Artificial Sequence: Synthetic Linker"
DPVSKE

SEQ ID NO: 5294 - protein, 6 aa, Artificial Sequence
  source: /note="Description of Artificial Sequence: Synthetic Linker"
GLPGDK

SEQ ID NO: 5295 - protein, 6 aa, Artificial Sequence
  source: /note="Description of Artificial Sequence: Synthetic Linker"
IVPPGQ

SEQ ID NO: 5296 - protein, 9 aa, Artificial Sequence
  source: /note="Description of Artificial Sequence: Synthetic Linker"
TVPIAQDQV

SEQ ID NO: 5297 - protein, 11 aa, Artificial Sequence
  source: /note="Description of Artificial Sequence: Synthetic Linker"
EVPKNETKENG

SEQ ID NO: 5298 - protein, 12 aa, Artificial Sequence
  source: /note="Description of Artificial Sequence: Synthetic Linker"
MYYQQPGQQLAT

SEQ ID NO: 5299 - protein, 16 aa, Artificial Sequence
  source: /note="Description of Artificial Sequence: Synthetic Linker"
QPGCSSGQACENALPV

SEQ ID NO: 5300 - protein, 8 aa, Artificial Sequence
  source: /note="Description of Artificial Sequence: Synthetic Linker"
KYTYEHDP

SEQ ID NO: 5301 - protein, 10 aa, Artificial Sequence
  source: /note="Description of Artificial Sequence: Synthetic Linker"
IGGPPNACLD

SEQ ID NO: 5302 - protein, 20 aa, Artificial Sequence
  source: /note="Description of Artificial Sequence: Synthetic Linker"
ENAQRFNQAQSGNIQSTVML

SEQ ID NO: 5303 - protein, 25 aa, Artificial Sequence
  source: /note="Description of Artificial Sequence: Synthetic Linker"
LQNREHETNGVAKSDQKQEQLLLKK

SEQ ID NO: 5304 - protein, 9 aa, Artificial Sequence
  source: /note="Description of Artificial Sequence: Synthetic Linker"
CEMGSTFQL

SEQ ID NO: 5305 - protein, 26 aa, Artificial Sequence
  source: /note="Description of Artificial Sequence: Synthetic Linker"
PDGRNQNPDLTGLCEPTPQDHIKVTQ

SEQ ID NO: 5306 - protein, 4 aa, Artificial Sequence
  source: /note="Description of Artificial Sequence: Synthetic Linker"
NHPA

SEQ ID NO: 5307 - protein, 5 aa, Artificial Sequence
  source: /note="Description of Artificial Sequence: Synthetic Linker"
CNLTP

SEQ ID NO: 5308 - protein, 5 aa, Artificial Sequence
  source: /note="Description of Artificial Sequence: Synthetic Linker"
IRRTS

SEQ ID NO: 5309 - protein, 6 aa, Artificial Sequence
  source: /note="Description of Artificial Sequence: Synthetic Linker"
KYLPVK

SEQ ID NO: 5310 - protein, 7 aa, Artificial Sequence
  source: /note="Description of Artificial Sequence: Synthetic Linker"
ISGTPIQ

SEQ ID NO: 5311 - protein, 8 aa, Artificial Sequence
  source: /note="Description of Artificial Sequence: Synthetic Linker"
RDADASDK

SEQ ID NO: 5312 - protein, 9 aa, Artificial Sequence
  source: /note="Description of Artificial Sequence: Synthetic Linker"
TGEEGFDGA

SEQ ID NO: 5313 - protein, 10 aa, Artificial Sequence
  source: /note="Description of Artificial Sequence: Synthetic Linker"
ESLQTGKISV

SEQ ID NO: 5314 - protein, 14 aa, Artificial Sequence
  source: /note="Description of Artificial Sequence: Synthetic Linker"
DLFPQNYSTKAVEP

SEQ ID NO: 5315 - protein, 4 aa, Artificial Sequence
  source: /note="Description of Artificial Sequence: Synthetic Linker"
SATH

SEQ ID NO: 5316 - protein, 7 aa, Artificial Sequence
  source: /note="Description of Artificial Sequence: Synthetic Linker"
YIPLPEP

SEQ ID NO: 5317 - protein, 8 aa, Artificial Sequence
  source: /note="Description of Artificial Sequence: Synthetic Linker"
RKTDGYSG

SEQ ID NO: 5318 - protein, 9 aa, Artificial Sequence
  source: /note="Description of Artificial Sequence: Synthetic Linker"
PSRADPNHL

SEQ ID NO: 5319 - protein, 10 aa, Artificial Sequence
  source: /note="Description of Artificial Sequence: Synthetic Linker"
LGTTQNSLTE

SEQ ID NO: 5320 - protein, 9 aa, Artificial Sequence
  source: /note="Description of Artificial Sequence: Synthetic Linker"
NLLGQQPLV

SEQ ID NO: 5321 - protein, 10 aa, Artificial Sequence
  source: /note="Description of Artificial Sequence: Synthetic Linker"
SSYGPASGPL

SEQ ID NO: 5322 - protein, 11 aa, Artificial Sequence
  source: /note="Description of Artificial Sequence: Synthetic Linker"
VAQLPKKQVYI

SEQ ID NO: 5323 - protein, 16 aa, Artificial Sequence
  source: /note="Description of Artificial Sequence: Synthetic Linker"
SATPQGQTAKIEVPHT

SEQ ID NO: 5324 - protein, 4 aa, Artificial Sequence
  source: /note="Description of Artificial Sequence: Synthetic Linker"
FSCS

SEQ ID NO: 5325 - protein, 8 aa, Artificial Sequence
  source: /note="Description of Artificial Sequence: Synthetic Linker"
FWLAIDMS

SEQ ID NO: 5326 - protein, 9 aa, Artificial Sequence
  source: /note="Description of Artificial Sequence: Synthetic Linker"
VKAAPQAPV

SEQ ID NO: 5327 - protein, 13 aa, Artificial Sequence
  source: /note="Description of Artificial Sequence: Synthetic Linker"
ADQSESQMIPKDS

SEQ ID NO: 5328 - protein, 4 aa, Artificial Sequence
  source: /note="Description of Artificial Sequence: Synthetic Linker"
FAFI

SEQ ID NO: 5329 - protein, 4 aa, Artificial Sequence
  source: /note="Description of Artificial Sequence: Synthetic Linker"
IQNT

SEQ ID NO: 5330 - protein, 5 aa, Artificial Sequence
  source: /note="Description of Artificial Sequence: Synthetic Linker"
GTLSP

SEQ ID NO: 5331 - protein, 6 aa, Artificial Sequence
  source: /note="Description of Artificial Sequence: Synthetic Linker"
QVPQDD

SEQ ID NO: 5332 - protein, 8 aa, Artificial Sequence
  source: /note="Description of Artificial Sequence: Synthetic Linker"
HLSAGCPH

SEQ ID NO: 5333 - protein, 11 aa, Artificial Sequence
  source: /note="Description of Artificial Sequence: Synthetic Linker"
FSTRVLPAQAT

SEQ ID NO: 5334 - protein, 4 aa, Artificial Sequence
  source: /note="Description of Artificial Sequence: Synthetic Linker"
EMDS

SEQ ID NO: 5335 - protein, 5 aa, Artificial Sequence
  source: /note="Description of Artificial Sequence: Synthetic Linker"
HFPLK

SEQ ID NO: 5336 - protein, 6 aa, Artificial Sequence
  source: /note="Description of Artificial Sequence: Synthetic Linker"
DLDNVT

SEQ ID NO: 5337 - protein, 6 aa, Artificial Sequence
  source: /note="Description of Artificial Sequence: Synthetic Linker"
FDGQLE

SEQ ID NO: 5338 - protein, 7 aa, Artificial Sequence
  source: /note="Description of Artificial Sequence: Synthetic Linker"
ITNECQW

SEQ ID NO: 5339 - protein, 7 aa, Artificial Sequence
  source: /note="Description of Artificial Sequence: Synthetic Linker"
SQPFPVV

SEQ ID NO: 5340 - protein, 7 aa, Artificial Sequence
  source: /note="Description of Artificial Sequence: Synthetic Linker"
TGARSNF

SEQ ID NO: 5341 - protein, 8 aa, Artificial Sequence
  source: /note="Description of Artificial Sequence: Synthetic Linker"
ESDASNPF

SEQ ID NO: 5342 - protein, 8 aa, Artificial Sequence
  source: /note="Description of Artificial Sequence: Synthetic Linker"
HFFGNRSI

SEQ ID NO: 5343 - protein, 9 aa, Artificial Sequence
  source: /note="Description of Artificial Sequence: Synthetic Linker"
QPIYPATLT

SEQ ID NO: 5344 - protein, 10 aa, Artificial Sequence
  source: /note="Description of Artificial Sequence: Synthetic Linker"
FLAGTRKCSV

SEQ ID NO: 5345 - protein, 12 aa, Artificial Sequence
  source: /note="Description of Artificial Sequence: Synthetic Linker"
LNPQHSAPKPNV

SEQ ID NO: 5346 - protein, 12 aa, Artificial Sequence
  source: /note="Description of Artificial Sequence: Synthetic Linker"
SKGKQLGENQLV

SEQ ID NO: 5347 - protein, 15 aa, Artificial Sequence
  source: /note="Description of Artificial Sequence: Synthetic Linker"
ATKQDPVRPKRPLSS

SEQ ID NO: 5348 - protein, 16 aa, Artificial Sequence
  source: /note="Description of Artificial Sequence: Synthetic Linker"
ICDSHPTNKNNPTTPL

SEQ ID NO: 5349 - protein, 9 aa, Artificial Sequence
  source: /note="Description of Artificial Sequence: Synthetic Linker"
YLDTKPAPV

SEQ ID NO: 5350 - protein, 4 aa, Artificial Sequence
  source: /note="Description of Artificial Sequence: Synthetic Linker"
IHKK

SEQ ID NO: 5351 - protein, 5 aa, Artificial Sequence
  source: /note="Description of Artificial Sequence: Synthetic Linker"
GIMPG

SEQ ID NO: 5352 - protein, 5 aa, Artificial Sequence
  source: /note="Description of Artificial Sequence: Synthetic Linker"
NPGEC

SEQ ID NO: 5353 - protein, 7 aa, Artificial Sequence
  source: /note="Description of Artificial Sequence: Synthetic Linker"
IGPNCPG

SEQ ID NO: 5354 - protein, 8 aa, Artificial Sequence
  source: /note="Description of Artificial Sequence: Synthetic Linker"
CITEGIPQ

SEQ ID NO: 5355 - protein, 8 aa, Artificial Sequence
  source: /note="Description of Artificial Sequence: Synthetic Linker"
LLRQGKTR

SEQ ID NO: 5356 - protein, 4 aa, Artificial Sequence
  source: /note="Description of Artificial Sequence: Synthetic Linker"
MRDQ

SEQ ID NO: 5357 - protein, 4 aa, Artificial Sequence
  source: /note="Description of Artificial Sequence: Synthetic Linker"
QEDP

SEQ ID NO: 5358 - protein, 5 aa, Artificial Sequence
  source: /note="Description of Artificial Sequence: Synthetic Linker"
CLDGK

SEQ ID NO: 5359 - protein, 5 aa, Artificial Sequence
  source: /note="Description of Artificial Sequence: Synthetic Linker"
QWELN

SEQ ID NO: 5360 - protein, 6 aa, Artificial Sequence
  source: /note="Description of Artificial Sequence: Synthetic Linker"
ALDGNI

SEQ ID NO: 5361 - protein, 6 aa, Artificial Sequence
  source: /note="Description of Artificial Sequence: Synthetic Linker"
TKQGDL

SEQ ID NO: 5362 - protein, 31 aa, Artificial Sequence
  source: /note="Description of Artificial Sequence: Synthetic Linker"
KGEKYEKRIERLSVRKEEDVKTRSGKLGDNV

SEQ ID NO: 5363 - protein, 27 aa, Artificial Sequence
  source: /note="Description of Artificial Sequence: Synthetic Linker"
AEDRPLSRELPAPAGGPVALSLHDEPT

SEQ ID NO: 5364 - protein, 9 aa, Artificial Sequence
  source: /note="Description of Artificial Sequence: Synthetic Linker"
PYQKTSIPK

SEQ ID NO: 5365 - protein, 9 aa, Artificial Sequence
  source: /note="Description of Artificial Sequence: Synthetic Linker"
RGAGKPNSS

SEQ ID NO: 5366 - protein, 6 aa, Artificial Sequence
  source: /note="Description of Artificial Sequence: Synthetic Linker"
AVGKNP

SEQ ID NO: 5367 - protein, 6 aa, Artificial Sequence
  source: /note="Description of Artificial Sequence: Synthetic Linker"
DTATNT

SEQ ID NO: 5368 - protein, 6 aa, Artificial Sequence
  source: /note="Description of Artificial Sequence: Synthetic Linker"
FLSEPV

SEQ ID NO: 5369 - protein, 6 aa, Artificial Sequence
  source: /note="Description of Artificial Sequence: Synthetic Linker"
LSFCNT

SEQ ID NO: 5370 - protein, 7 aa, Artificial Sequence
  source: /note="Description of Artificial Sequence: Synthetic Linker"
SNITSGY

SEQ ID NO: 5371 - protein, 7 aa, Artificial Sequence
  source: /note="Description of Artificial Sequence: Synthetic Linker"
VTPDGKK

SEQ ID NO: 5372 - protein, 7 aa, Artificial Sequence
  source: /note="Description of Artificial Sequence: Synthetic Linker"
YASGQFI

SEQ ID NO: 5373 - protein, 13 aa, Artificial Sequence
  source: /note="Description of Artificial Sequence: Synthetic Linker"
SIPVQPVYPSADF

SEQ ID NO: 5374 - protein, 7 aa, Artificial Sequence
  source: /note="Description of Artificial Sequence: Synthetic Linker"
EIPTSNI

SEQ ID NO: 5375 - protein, 8 aa, Artificial Sequence
  source: /note="Description of Artificial Sequence: Synthetic Linker"
KADFPTPS

SEQ ID NO: 5376 - protein, 10 aa, Artificial Sequence
  source: /note="Description of Artificial Sequence: Synthetic Linker"
HPYIQNPDPA

SEQ ID NO: 5377 - protein, 11 aa, Artificial Sequence
  source: /note="Description of Artificial Sequence: Synthetic Linker"
DTPPNFLDDDM

SEQ ID NO: 5378 - protein, 7 aa, Artificial Sequence
  source: /note="Description of Artificial Sequence: Synthetic Linker"
FCKALNP

SEQ ID NO: 5379 - protein, 13 aa, Artificial Sequence
  source: /note="Description of Artificial Sequence: Synthetic Linker"
HHDYSLPAAGESW

SEQ ID NO: 5380 - protein, 4 aa, Artificial Sequence
  source: /note="Description of Artificial Sequence: Synthetic Linker"
AEGV

SEQ ID NO: 5381 - protein, 7 aa, Artificial Sequence
  source: /note="Description of Artificial Sequence: Synthetic Linker"
LMLIADV

SEQ ID NO: 5382 - protein, 8 aa, Artificial Sequence
  source: /note="Description of Artificial Sequence: Synthetic Linker"
EAGEEGEK

SEQ ID NO: 5383 - protein, 22 aa, Artificial Sequence
  source: /note="Description of Artificial Sequence: Synthetic Linker"
RSTPPPEMPKPVPRKEVQAGVE

SEQ ID NO: 5384 - protein, 6 aa, Artificial Sequence
  source: /note="Description of Artificial Sequence: Synthetic Linker"
CVPLVR

SEQ ID NO: 5385 - protein, 6 aa, Artificial Sequence
  source: /note="Description of Artificial Sequence: Synthetic Linker"
KSDPIQ

SEQ ID NO: 5386 - protein, 4 aa, Artificial Sequence
  source: /note="Description of Artificial Sequence: Synthetic Linker"
AGVE

SEQ ID NO: 5387 - protein, 12 aa, Artificial Sequence
  source: /note="Description of Artificial Sequence: Synthetic Linker"
NAGGELFRDVNV

SEQ ID NO: 5388 - protein, 17 aa, Artificial Sequence
  source: /note="Description of Artificial Sequence: Synthetic Linker"
ERGAWSAPLPRQPRADT

SEQ ID NO: 5389 - protein, 19 aa, Artificial Sequence
  source: /note="Description of Artificial Sequence: Synthetic Linker"
LAGQQLEHGQTRRFGAISQ

SEQ ID NO: 5390 - protein, 4 aa, Artificial Sequence
  source: /note="Description of Artificial Sequence: Synthetic Linker"
IDNG

SEQ ID NO: 5391 - protein, 4 aa, Artificial Sequence
  source: /note="Description of Artificial Sequence: Synthetic Linker"
KVSW

SEQ ID NO: 5392 - protein, 5 aa, Artificial Sequence
  source: /note="Description of Artificial Sequence: Synthetic Linker"
NRGES

SEQ ID NO: 5393 - protein, 6 aa, Artificial Sequence
  source: /note="Description of Artificial Sequence: Synthetic Linker"
ITAKDE

SEQ ID NO: 5394 - protein, 6 aa, Artificial Sequence
  source: /note="Description of Artificial Sequence: Synthetic Linker"
LWPHTK

SEQ ID NO: 5395 - protein, 6 aa, Artificial Sequence
  source: /note="Description of Artificial Sequence: Synthetic Linker"
MAIGPV

SEQ ID NO: 5396 - protein, 8 aa, Artificial Sequence
  source: /note="Description of Artificial Sequence: Synthetic Linker"
AEKNYDVI

SEQ ID NO: 5397 - protein, 8 aa, Artificial Sequence
  source: /note="Description of Artificial Sequence: Synthetic Linker"
DLDRTLTQ

SEQ ID NO: 5398 - protein, 9 aa, Artificial Sequence
  source: /note="Description of Artificial Sequence: Synthetic Linker"
NIAHDDKPG

SEQ ID NO: 5399 - protein, 4 aa, Artificial Sequence
  source: /note="Description of Artificial Sequence: Synthetic Linker"
FFDK

SEQ ID NO: 5400 - protein, 6 aa, Artificial Sequence
  source: /note="Description of Artificial Sequence: Synthetic Linker"
LFSNDE

SEQ ID NO: 5401 - protein, 6 aa, Artificial Sequence
  source: /note="Description of Artificial Sequence: Synthetic Linker"
VTPGSE

SEQ ID NO: 5402 - protein, 7 aa, Artificial Sequence
  source: /note="Description of Artificial Sequence: Synthetic Linker"
ERKERDH

SEQ ID NO: 5403 - protein, 12 aa, Artificial Sequence
  source: /note="Description of Artificial Sequence: Synthetic Linker"
FDIDQNISSDDF

SEQ ID NO: 5404 - protein, 17 aa, Artificial Sequence
  source: /note="Description of Artificial Sequence: Synthetic Linker"
ELIDAIPEDENVTLYSQ

SEQ ID NO: 5405 - protein, 19 aa, Artificial Sequence
  source: /note="Description of Artificial Sequence: Synthetic Linker"
TMKQIVNENMKIERKVVSR

SEQ ID NO: 5406 - protein, 23 aa, Artificial Sequence
  source: /note="Description of Artificial Sequence: Synthetic Linker"
AHAIKRLYGNVKFGVGPVIEGGF

SEQ ID NO: 5407 - protein, 21 aa, Artificial Sequence
  source: /note="Description of Artificial Sequence: Synthetic Linker"
INGGWGPWSPWDICSVTCGGG

SEQ ID NO: 5408 - protein, 16 aa, Artificial Sequence
  source: /note="Description of Artificial Sequence: Synthetic Linker"
LKMKGLTYTMCDKTKF

SEQ ID NO: 5409 - protein, 7 aa, Artificial Sequence
  source: /note="Description of Artificial Sequence: Synthetic Linker"
LRGEVVS

SEQ ID NO: 5410 - protein, 10 aa, Artificial Sequence
  source: /note="Description of Artificial Sequence: Synthetic Linker"
IHLPKTLEGM

SEQ ID NO: 5411 - protein, 4 aa, Artificial Sequence
  source: /note="Description of Artificial Sequence: Synthetic Linker"
PYPV

SEQ ID NO: 5412 - protein, 14 aa, Artificial Sequence
  source: /note="Description of Artificial Sequence: Synthetic Linker"
LNKEGEPTKQRTRD

SEQ ID NO: 5413 - protein, 11 aa, Artificial Sequence
  source: /note="Description of Artificial Sequence: Synthetic Linker"
RFRDRLPEKLR

SEQ ID NO: 5414 - protein, 12 aa, Artificial Sequence
  source: /note="Description of Artificial Sequence: Synthetic Linker"
DAPQQDPEGNKT

SEQ ID NO: 5415 - protein, 4 aa, Artificial Sequence
  source: /note="Description of Artificial Sequence: Synthetic Linker"
ELPL

SEQ ID NO: 5416 - protein, 4 aa, Artificial Sequence
  source: /note="Description of Artificial Sequence: Synthetic Linker"
VHGK

SEQ ID NO: 5417 - protein, 5 aa, Artificial Sequence
  source: /note="Description of Artificial Sequence: Synthetic Linker"
TNTEK

SEQ ID NO: 5418 - protein, 9 aa, Artificial Sequence
  source: /note="Description of Artificial Sequence: Synthetic Linker"
DSPLKYWPK

SEQ ID NO: 5419 - protein, 12 aa, Artificial Sequence
  source: /note="Description of Artificial Sequence: Synthetic Linker"
SCSEPRCFNGGT

SEQ ID NO: 5420 - protein, 4 aa, Artificial Sequence
  source: /note="Description of Artificial Sequence: Synthetic Linker"
IDGK

SEQ ID NO: 5421 - protein, 5 aa, Artificial Sequence
  source: /note="Description of Artificial Sequence: Synthetic Linker"
PLEGT

SEQ ID NO: 5422 - protein, 9 aa, Artificial Sequence
  source: /note="Description of Artificial Sequence: Synthetic Linker"
AMPGWQDKV

SEQ ID NO: 5423 - protein, 8 aa, Artificial Sequence
  source: /note="Description of Artificial Sequence: Synthetic Linker"
YKKTARPK

SEQ ID NO: 5424 - protein, 12 aa, Artificial Sequence
  source: /note="Description of Artificial Sequence: Synthetic Linker"
TWAPHPRPLPQA

SEQ ID NO: 5425 - protein, 7 aa, Artificial Sequence
  source: /note="Description of Artificial Sequence: Synthetic Linker"
ELNEEMP

SEQ ID NO: 5426 - protein, 17 aa, Artificial Sequence
  source: /note="Description of Artificial Sequence: Synthetic Linker"
IVDYSPQQEGKVFFGAW

SEQ ID NO: 5427 - protein, 6 aa, Artificial Sequence
  source: /note="Description of Artificial Sequence: Synthetic Linker"
QRVRNR

SEQ ID NO: 5428 - protein, 5 aa, Artificial Sequence
  source: /note="Description of Artificial Sequence: Synthetic Linker"
LFVKP

SEQ ID NO: 5429 - protein, 6 aa, Artificial Sequence
  source: /note="Description of Artificial Sequence: Synthetic Linker"
NLNLTP

SEQ ID NO: 5430 - protein, 18 aa, Artificial Sequence
  source: /note="Description of Artificial Sequence: Synthetic Linker"
YSKKAPPQEEIEFVGEHP

SEQ ID NO: 5431 - protein, 4 aa, Artificial Sequence
  source: /note="Description of Artificial Sequence: Synthetic Linker"
IHSP

SEQ ID NO: 5432 - protein, 4 aa, Artificial Sequence
  source: /note="Description of Artificial Sequence: Synthetic Linker"
LTDS

SEQ ID NO: 5433 - protein, 5 aa, Artificial Sequence
  source: /note="Description of Artificial Sequence: Synthetic Linker"
KDGRL

SEQ ID NO: 5434 - protein, 9 aa, Artificial Sequence
  source: /note="Description of Artificial Sequence: Synthetic Linker"
ARINEREET

SEQ ID NO: 5435 - protein, 19 aa, Artificial Sequence
  source: /note="Description of Artificial Sequence: Synthetic Linker"
LWNCAPPQSEVVYRPLVSL

SEQ ID NO: 5436 - protein, 5 aa, Artificial Sequence
  source: /note="Description of Artificial Sequence: Synthetic Linker"
EFPEV

SEQ ID NO: 5437 - protein, 7 aa, Artificial Sequence
  source: /note="Description of Artificial Sequence: Synthetic Linker"
RTASHSI

SEQ ID NO: 5438 - protein, 21 aa, Artificial Sequence
  source: /note="Description of Artificial Sequence: Synthetic Linker"
EDGVIRRRVALLDPVKVNTKV

SEQ ID NO: 5439 - protein, 9 aa, Artificial Sequence
  source: /note="Description of Artificial Sequence: Synthetic Linker"
VLAGGKSGV

SEQ ID NO: 5440 - protein, 4 aa, Artificial Sequence
  source: /note="Description of Artificial Sequence: Synthetic Linker"
QKHV

SEQ ID NO: 5441 - protein, 5 aa, Artificial Sequence
  source: /note="Description of Artificial Sequence: Synthetic Linker"
VAPLI

SEQ ID NO: 5442 - protein, 6 aa, Artificial Sequence
  source: /note="Description of Artificial Sequence: Synthetic Linker"
AADTGL

SEQ ID NO: 5443 - protein, 6 aa, Artificial Sequence
  source: /note="Description of Artificial Sequence: Synthetic Linker"
FANDPQ

SEQ ID NO: 5444 - protein, 6 aa, Artificial Sequence
  source: /note="Description of Artificial Sequence: Synthetic Linker"
LLDHHQ

SEQ ID NO: 5445 - protein, 9 aa, Artificial Sequence
  source: /note="Description of Artificial Sequence: Synthetic Linker"
SSPHALGVI

SEQ ID NO: 5446 - protein, 11 aa, Artificial Sequence
  source: /note="Description of Artificial Sequence: Synthetic Linker"
SERSFPDDLNM

SEQ ID NO: 5447 - protein, 21 aa, Artificial Sequence
  source: /note="Description of Artificial Sequence: Synthetic Linker"
DMGYLGPDPVARSLRTRRAGA

SEQ ID NO: 5448 - protein, 5 aa, Artificial Sequence
  source: /note="Description of Artificial Sequence: Synthetic Linker"
EMPSL

SEQ ID NO: 5449 - protein, 5 aa, Artificial Sequence
  source: /note="Description of Artificial Sequence: Synthetic Linker"
RREDI

SEQ ID NO: 5450 - protein, 8 aa, Artificial Sequence
  source: /note="Description of Artificial Sequence: Synthetic Linker"
IHYDWPGN

SEQ ID NO: 5451 - protein, 9 aa, Artificial Sequence
  source: /note="Description of Artificial Sequence: Synthetic Linker"
LLTGEYISE

SEQ ID NO: 5452 - protein, 11 aa, Artificial Sequence
  source: /note="Description of Artificial Sequence: Synthetic Linker"
RNRKVVKGFTP

SEQ ID NO: 5453 - protein, 17 aa, Artificial Sequence
  source: /note="Description of Artificial Sequence: Synthetic Linker"
IAATPIKTEYSGEIQPL

SEQ ID NO: 5454 - protein, 4 aa, Artificial Sequence
  source: /note="Description of Artificial Sequence: Synthetic Linker"
NQYR

SEQ ID NO: 5455 - protein, 7 aa, Artificial Sequence
  source: /note="Description of Artificial Sequence: Synthetic Linker"
EMGLSLQ

SEQ ID NO: 5456 - protein, 7 aa, Artificial Sequence
  source: /note="Description of Artificial Sequence: Synthetic Linker"
KDSAQNS

SEQ ID NO: 5457 - protein, 11 aa, Artificial Sequence
  source: /note="Description of Artificial Sequence: Synthetic Linker"
HDVELNLDYEE

SEQ ID NO: 5458 - protein, 5 aa, Artificial Sequence
  source: /note="Description of Artificial Sequence: Synthetic Linker"
PVDAQ

SEQ ID NO: 5459 - protein, 5 aa, Artificial Sequence
  source: /note="Description of Artificial Sequence: Synthetic Linker"
VPIIE

SEQ ID NO: 5460 - protein, 7 aa, Artificial Sequence
  source: /note="Description of Artificial Sequence: Synthetic Linker"
GVFDGGK

SEQ ID NO: 5461 - protein, 4 aa, Artificial Sequence
  source: /note="Description of Artificial Sequence: Synthetic Linker"
YLRE

SEQ ID NO: 5462 - protein, 6 aa, Artificial Sequence
  source: /note="Description of Artificial Sequence: Synthetic Linker"
IEEDSP

SEQ ID NO: 5463 - protein, 5 aa, Artificial Sequence
  source: /note="Description of Artificial Sequence: Synthetic Linker"
RKSFL

SEQ ID NO: 5464 - protein, 7 aa, Artificial Sequence
  source: /note="Description of Artificial Sequence: Synthetic Linker"
DILDDDR

SEQ ID NO: 5465 - protein, 7 aa, Artificial Sequence
  source: /note="Description of Artificial Sequence: Synthetic Linker"
SGKGGDK

SEQ ID NO: 5466 - protein, 15 aa, Artificial Sequence
  source: /note="Description of Artificial Sequence: Synthetic Linker"
MGGTFTDKDPFRSGR

SEQ ID NO: 5467 - protein, 4 aa, Artificial Sequence
  source: /note="Description of Artificial Sequence: Synthetic Linker"
VEER

SEQ ID NO: 5468 - protein, 7 aa, Artificial Sequence
  source: /note="Description of Artificial Sequence: Synthetic Linker"
ELPELTA

SEQ ID NO: 5469 - protein, 11 aa, Artificial Sequence
  source: /note="Description of Artificial Sequence: Synthetic Linker"
IKRFGVEDGSV

SEQ ID NO: 5470 - protein, 4 aa, Artificial Sequence
  source: /note="Description of Artificial Sequence: Synthetic Linker"
AYRW

SEQ ID NO: 5471 - protein, 4 aa, Artificial Sequence
  source: /note="Description of Artificial Sequence: Synthetic Linker"
EDAL

SEQ ID NO: 5472 - protein, 7 aa, Artificial Sequence
  source: /note="Description of Artificial Sequence: Synthetic Linker"
IRTVGEA

SEQ ID NO: 5473 - protein, 15 aa, Artificial Sequence
  source: /note="Description of Artificial Sequence: Synthetic Linker"
ETGLNAYLPGLAGKE

SEQ ID NO: 5474 - protein, 9 aa, Artificial Sequence
  source: /note="Description of Artificial Sequence: Synthetic Linker"
LEGRIKGKE

SEQ ID NO: 5475 - protein, 5 aa, Artificial Sequence
  source: /note="Description of Artificial Sequence: Synthetic Linker"
RMRNF

SEQ ID NO: 5476 - protein, 6 aa, Artificial Sequence
  source: /note="Description of Artificial Sequence: Synthetic Linker"
RGVLPE

SEQ ID NO: 5477 - protein, 6 aa, Artificial Sequence
  source: /note="Description of Artificial Sequence: Synthetic Linker"
SLEEQR

SEQ ID NO: 5478 - protein, 7 aa, Artificial Sequence
  source: /note="Description of Artificial Sequence: Synthetic Linker"
ANQLQNY

SEQ ID NO: 5479 - protein, 7 aa, Artificial Sequence
  source: /note="Description of Artificial Sequence: Synthetic Linker"
NYLLPAG

SEQ ID NO: 5480 - protein, 14 aa, Artificial Sequence
  source: /note="Description of Artificial Sequence: Synthetic Linker"
LDWQPRENPFQNLK

SEQ ID NO: 5481 - protein, 4 aa, Artificial Sequence
  source: /note="Description of Artificial Sequence: Synthetic Linker"
RIQM

SEQ ID NO: 5482 - protein, 4 aa, Artificial Sequence
  source: /note="Description of Artificial Sequence: Synthetic Linker"
WTDP

SEQ ID NO: 5483 - protein, 5 aa, Artificial Sequence
  source: /note="Description of Artificial Sequence: Synthetic Linker"
ELGLL

SEQ ID NO: 5484 - protein, 7 aa, Artificial Sequence
  source: /note="Description of Artificial Sequence: Synthetic Linker"
APSHGQI

SEQ ID NO: 5485 - protein, 8 aa, Artificial Sequence
  source: /note="Description of Artificial Sequence: Synthetic Linker"
ATGMVDER

SEQ ID NO: 5486 - protein, 5 aa, Artificial Sequence
  source: /note="Description of Artificial Sequence: Synthetic Linker"
FSLDE

SEQ ID NO: 5487 - protein, 6 aa, Artificial Sequence
  source: /note="Description of Artificial Sequence: Synthetic Linker"
HWKLEA

SEQ ID NO: 5488 - protein, 4 aa, Artificial Sequence
  source: /note="Description of Artificial Sequence: Synthetic Linker"
SEIG

SEQ ID NO: 5489 - protein, 8 aa, Artificial Sequence
  source: /note="Description of Artificial Sequence: Synthetic Linker"
KGIGHSRF

SEQ ID NO: 5490 - protein, 5 aa, Artificial Sequence
  source: /note="Description of Artificial Sequence: Synthetic Linker"
EGIKD

SEQ ID NO: 5491 - protein, 7 aa, Artificial Sequence
  source: /note="Description of Artificial Sequence: Synthetic Linker"
LSRFPTP

SEQ ID NO: 5492 - protein, 15 aa, Artificial Sequence
  source: /note="Description of Artificial Sequence: Synthetic Linker"
LLSPYHHVSGYSPRY

SEQ ID NO: 5493 - protein, 4 aa, Artificial Sequence
  source: /note="Description of Artificial Sequence: Synthetic Linker"
PGDW

SEQ ID NO: 5494 - protein, 6 aa, Artificial Sequence
  source: /note="Description of Artificial Sequence: Synthetic Linker"
DINKNE

SEQ ID NO: 5495 - protein, 6 aa, Artificial Sequence
  source: /note="Description of Artificial Sequence: Synthetic Linker"
ITPYAE

SEQ ID NO: 5496 - protein, 7 aa, Artificial Sequence
  source: /note="Description of Artificial Sequence: Synthetic Linker"
EFQSIGD

SEQ ID NO: 5497 - protein, 7 aa, Artificial Sequence
  source: /note="Description of Artificial Sequence: Synthetic Linker"
KDPEGNV

SEQ ID NO: 5498 - protein, 7 aa, Artificial Sequence
  source: /note="Description of Artificial Sequence: Synthetic Linker"
SLSVIGE

SEQ ID NO: 5499 - protein, 7 aa, Artificial Sequence
  source: /note="Description of Artificial Sequence: Synthetic Linker"
SPVNSKR

SEQ ID NO: 5500 - protein, 8 aa, Artificial Sequence
  source: /note="Description of Artificial Sequence: Synthetic Linker"
ENTRGFHG

SEQ ID NO: 5501 - protein, 8 aa, Artificial Sequence
  source: /note="Description of Artificial Sequence: Synthetic Linker"
NNLKRDYT

SEQ ID NO: 5502 - protein, 10 aa, Artificial Sequence
  source: /note="Description of Artificial Sequence: Synthetic Linker"
KYEDFRSPSA

SEQ ID NO: 5503 - protein, 24 aa, Artificial Sequence
  source: /note="Description of Artificial Sequence: Synthetic Linker"
YPRLTNKIPKPPQEVKPHPYGVDR

SEQ ID NO: 5504 - protein, 7 aa, Artificial Sequence
  source: /note="Description of Artificial Sequence: Synthetic Linker"
ARDRSYE

SEQ ID NO: 5505 - protein, 13 aa, Artificial Sequence
  source: /note="Description of Artificial Sequence: Synthetic Linker"
VTSTVKNDIYAHI

SEQ ID NO: 5506 - protein, 22 aa, Artificial Sequence
  source: /note="Description of Artificial Sequence: Synthetic Linker"
PYSERYGYRPALIPRPVMAGTL

SEQ ID NO: 5507 - protein, 5 aa, Artificial Sequence
  source: /note="Description of Artificial Sequence: Synthetic Linker"
VSQPG

SEQ ID NO: 5508 - protein, 6 aa, Artificial Sequence
  source: /note="Description of Artificial Sequence: Synthetic Linker"
LEGLPY

SEQ ID NO: 5509 - protein, 4 aa, Artificial Sequence
  source: /note="Description of Artificial Sequence: Synthetic Linker"
QPGV

SEQ ID NO: 5510 - protein, 5 aa, Artificial Sequence
  source: /note="Description of Artificial Sequence: Synthetic Linker"
WKLEG

SEQ ID NO: 5511 - protein, 6 aa, Artificial Sequence
  source: /note="Description of Artificial Sequence: Synthetic Linker"
TAYNAP

SEQ ID NO: 5512 - protein, 11 aa, Artificial Sequence
  source: /note="Description of Artificial Sequence: Synthetic Linker"
HKHDLSETNVY

SEQ ID NO: 5513 - protein, 7 aa, Artificial Sequence
  source: /note="Description of Artificial Sequence: Synthetic Linker"
VLQAVTD

SEQ ID NO: 5514 - protein, 4 aa, Artificial Sequence
  source: /note="Description of Artificial Sequence: Synthetic Linker"
YKDK

SEQ ID NO: 5515 - protein, 6 aa, Artificial Sequence
  source: /note="Description of Artificial Sequence: Synthetic Linker"
NLPFNM

SEQ ID NO: 5516 - protein, 6 aa, Artificial Sequence
  source: /note="Description of Artificial Sequence: Synthetic Linker"
WGVKDP

SEQ ID NO: 5517 - protein, 13 aa, Artificial Sequence
  source: /note="Description of Artificial Sequence: Synthetic Linker"
QKKKYGDKVPENL

SEQ ID NO: 5518 - protein, 14 aa, Artificial Sequence
  source: /note="Description of Artificial Sequence: Synthetic Linker"
NDLVEFNRFTNSPL

SEQ ID NO: 5519 - protein, 10 aa, Artificial Sequence
  source: /note="Description of Artificial Sequence: Synthetic Linker"
LKEQESPVKV

SEQ ID NO: 5520 - protein, 6 aa, Artificial Sequence
  source: /note="Description of Artificial Sequence: Synthetic Linker"
EEGIAN

SEQ ID NO: 5521 - protein, 11 aa, Artificial Sequence
  source: /note="Description of Artificial Sequence: Synthetic Linker"
ADFQGAGRRFD

SEQ ID NO: 5522 - protein, 6 aa, Artificial Sequence
  source: /note="Description of Artificial Sequence: Synthetic Linker"
AAGLPR

SEQ ID NO: 5523 - protein, 10 aa, Artificial Sequence
  source: /note="Description of Artificial Sequence: Synthetic Linker"
TFTGLPHRFE

SEQ ID NO: 5524 - protein, 4 aa, Artificial Sequence
  source: /note="Description of Artificial Sequence: Synthetic Linker"
TTVD

SEQ ID NO: 5525 - protein, 4 aa, Artificial Sequence
  source: /note="Description of Artificial Sequence: Synthetic Linker"
DNLR

SEQ ID NO: 5526 - protein, 5 aa, Artificial Sequence
  source: /note="Description of Artificial Sequence: Synthetic Linker"
FYHEP

SEQ ID NO: 5527 - protein, 6 aa, Artificial Sequence
  source: /note="Description of Artificial Sequence: Synthetic Linker"
ALGYPL

SEQ ID NO: 5528 - protein, 6 aa, Artificial Sequence
  source: /note="Description of Artificial Sequence: Synthetic Linker"
LLGEIS

SEQ ID NO: 5529 - protein, 6 aa, Artificial Sequence
  source: /note="Description of Artificial Sequence: Synthetic Linker"
MGTVGN

SEQ ID NO: 5530 - protein, 6 aa, Artificial Sequence
  source: /note="Description of Artificial Sequence: Synthetic Linker"
TGTNGK

SEQ ID NO: 5531 - protein, 10 aa, Artificial Sequence
  source: /note="Description of Artificial Sequence: Synthetic Linker"
RLQPVCGRME

SEQ ID NO: 5532 - protein, 12 aa, Artificial Sequence
  source: /note="Description of Artificial Sequence: Synthetic Linker"
TSEAHEKPEEKR

SEQ ID NO: 5533 - protein, 16 aa, Artificial Sequence
  source: /note="Description of Artificial Sequence: Synthetic Linker"
NFGGYFPNKLAEYHDF

SEQ ID NO: 5534 - protein, 15 aa, Artificial Sequence
  source: /note="Description of Artificial Sequence: Synthetic Linker"
RFAPPTWERIYPLDL

SEQ ID NO: 5535 - protein, 4 aa, Artificial Sequence
  source: /note="Description of Artificial Sequence: Synthetic Linker"
VFQP

SEQ ID NO: 5536 - protein, 13 aa, Artificial Sequence
  source: /note="Description of Artificial Sequence: Synthetic Linker"
EKASPAFYPQGQE

SEQ ID NO: 5537 - protein, 35 aa, Artificial Sequence
  source: /note="Description of Artificial Sequence: Synthetic Linker"
SMAVRFAKVPPDAAKAFIADRSMLFNGGTASRPPV

SEQ ID NO: 5538 - protein, 4 aa, Artificial Sequence
  source: /note="Description of Artificial Sequence: Synthetic Linker"
VLKL

SEQ ID NO: 5539 - protein, 6 aa, Artificial Sequence
  source: /note="Description of Artificial Sequence: Synthetic Linker"
DLKNSK

SEQ ID NO: 5540 - protein, 9 aa, Artificial Sequence
  source: /note="Description of Artificial Sequence: Synthetic Linker"
LKKDFQGVE

SEQ ID NO: 5541 - protein, 4 aa, Artificial Sequence
  source: /note="Description of Artificial Sequence: Synthetic Linker"
GYTG

SEQ ID NO: 5542 - protein, 4 aa, Artificial Sequence
  source: /note="Description of Artificial Sequence: Synthetic Linker"
PMSD

SEQ ID NO: 5543 - protein, 4 aa, Artificial Sequence
  source: /note="Description of Artificial Sequence: Synthetic Linker"
SDPE

SEQ ID NO: 5544 - protein, 5 aa, Artificial Sequence
  source: /note="Description of Artificial Sequence: Synthetic Linker"
DAPGQ

SEQ ID NO: 5545 - protein, 5 aa, Artificial Sequence
  source: /note="Description of Artificial Sequence: Synthetic Linker"
FEQTL

SEQ ID NO: 5546 - protein, 5 aa, Artificial Sequence
  source: /note="Description of Artificial Sequence: Synthetic Linker"
GGLSQ

SEQ ID NO: 5547 - protein, 6 aa, Artificial Sequence
  source: /note="Description of Artificial Sequence: Synthetic Linker"
AGENEI

SEQ ID NO: 5548 - protein, 6 aa, Artificial Sequence
  source: /note="Description of Artificial Sequence: Synthetic Linker"
QRCGFV

SEQ ID NO: 5549 - protein, 6 aa, Artificial Sequence
  source: /note="Description of Artificial Sequence: Synthetic Linker"
RQREGT

SEQ ID NO: 5550 - protein, 7 aa, Artificial Sequence
  source: /note="Description of Artificial Sequence: Synthetic Linker"
HGNNPLA

SEQ ID NO: 5551 - protein, 8 aa, Artificial Sequence
  source: /note="Description of Artificial Sequence: Synthetic Linker"
GAHYRTSP

SEQ ID NO: 5552 - protein, 8 aa, Artificial Sequence
  source: /note="Description of Artificial Sequence: Synthetic Linker"
QYTQDLDY

SEQ ID NO: 5553 - protein, 11 aa, Artificial Sequence
  source: /note="Description of Artificial Sequence: Synthetic Linker"
WAGFRRPRGNL

SEQ ID NO: 5554 - protein, 13 aa, Artificial Sequence
  source: /note="Description of Artificial Sequence: Synthetic Linker"
MGNHREASSGCYT

SEQ ID NO: 5555 - protein, 17 aa, Artificial Sequence
  source: /note="Description of Artificial Sequence: Synthetic Linker"
LVFDDENFTHTPQGNIV

SEQ ID NO: 5556 - protein, 6 aa, Artificial Sequence
  source: /note="Description of Artificial Sequence: Synthetic Linker"
ALPGFQ

SEQ ID NO: 5557 - protein, 14 aa, Artificial Sequence
  source: /note="Description of Artificial Sequence: Synthetic Linker"
RASSVAERHVSPDT

SEQ ID NO: 5558 - protein, 7 aa, Artificial Sequence
  source: /note="Description of Artificial Sequence: Synthetic Linker"
KISSGDW

SEQ ID NO: 5559 - protein, 7 aa, Artificial Sequence
  source: /note="Description of Artificial Sequence: Synthetic Linker"
SKSKNPI

SEQ ID NO: 5560 - protein, 11 aa, Artificial Sequence
  source: /note="Description of Artificial Sequence: Synthetic Linker"
FMNKDGCAGFT

SEQ ID NO: 5561 - protein, 4 aa, Artificial Sequence
  source: /note="Description of Artificial Sequence: Synthetic Linker"
IMGS

SEQ ID NO: 5562 - protein, 4 aa, Artificial Sequence
  source: /note="Description of Artificial Sequence: Synthetic Linker"
KPYK

SEQ ID NO: 5563 - protein, 5 aa, Artificial Sequence
  source: /note="Description of Artificial Sequence: Synthetic Linker"
EGPPM

SEQ ID NO: 5564 - protein, 5 aa, Artificial Sequence
  source: /note="Description of Artificial Sequence: Synthetic Linker"
LGAEI

SEQ ID NO: 5565 - protein, 5 aa, Artificial Sequence
  source: /note="Description of Artificial Sequence: Synthetic Linker"
YIPEK

SEQ ID NO: 5566 - protein, 6 aa, Artificial Sequence
  source: /note="Description of Artificial Sequence: Synthetic Linker"
GEKLNI

SEQ ID NO: 5567 - protein, 6 aa, Artificial Sequence
  source: /note="Description of Artificial Sequence: Synthetic Linker"
NKGYHI

SEQ ID NO: 5568 - protein, 7 aa, Artificial Sequence
  source: /note="Description of Artificial Sequence: Synthetic Linker"
CIETGEI

SEQ ID NO: 5569 - protein, 11 aa, Artificial Sequence
  source: /note="Description of Artificial Sequence: Synthetic Linker"
TGNPLLWSDDL

SEQ ID NO: 5570 - protein, 8 aa, Artificial Sequence
  source: /note="Description of Artificial Sequence: Synthetic Linker"
KHEYQDRF

SEQ ID NO: 5571 - protein, 9 aa, Artificial Sequence
  source: /note="Description of Artificial Sequence: Synthetic Linker"
CRFGYRDSI

SEQ ID NO: 5572 - protein, 9 aa, Artificial Sequence
  source: /note="Description of Artificial Sequence: Synthetic Linker"
RLDPTTVTP

SEQ ID NO: 5573 - protein, 11 aa, Artificial Sequence
  source: /note="Description of Artificial Sequence: Synthetic Linker"
PKEWQPVLTYG

SEQ ID NO: 5574 - protein, 19 aa, Artificial Sequence
  source: /note="Description of Artificial Sequence: Synthetic Linker"
CNTTKCNEGPILELENLPQ

SEQ ID NO: 5575 - protein, 24 aa, Artificial Sequence
  source: /note="Description of Artificial Sequence: Synthetic Linker"
CGLDLCNQGNSGRAVTYSRSRYLE

SEQ ID NO: 5576 - protein, 7 aa, Artificial Sequence
  source: /note="Description of Artificial Sequence: Synthetic Linker"
SFPKDPE

SEQ ID NO: 5577 - protein, 8 aa, Artificial Sequence
  source: /note="Description of Artificial Sequence: Synthetic Linker"
VRTEIAKK

SEQ ID NO: 5578 - protein, 14 aa, Artificial Sequence
  source: /note="Description of Artificial Sequence: Synthetic Linker"
IIRKDQRLKFGEGI

SEQ ID NO: 5579 - protein, 11 aa, Artificial Sequence
  source: /note="Description of Artificial Sequence: Synthetic Linker"
EQLLGTSFLTR

SEQ ID NO: 5580 - protein, 25 aa, Artificial Sequence
  source: /note="Description of Artificial Sequence: Synthetic Linker"
PHDQCACGVLTSEKRAPDLQDLPWQ

SEQ ID NO: 5581 - protein, 8 aa, Artificial Sequence
  source: /note="Description of Artificial Sequence: Synthetic Linker"
KVSGENHV

SEQ ID NO: 5582 - protein, 6 aa, Artificial Sequence
  source: /note="Description of Artificial Sequence: Synthetic Linker"
NVAEDY

SEQ ID NO: 5583 - protein, 4 aa, Artificial Sequence
  source: /note="Description of Artificial Sequence: Synthetic Linker"
IDWR

SEQ ID NO: 5584 - protein, 4 aa, Artificial Sequence
  source: /note="Description of Artificial Sequence: Synthetic Linker"
RKGS

SEQ ID NO: 5585 - protein, 5 aa, Artificial Sequence
  source: /note="Description of Artificial Sequence: Synthetic Linker"
LFKSP

SEQ ID NO: 5586 - protein, 8 aa, Artificial Sequence
  source: /note="Description of Artificial Sequence: Synthetic Linker"
QNLTAPAT

SEQ ID NO: 5587 - protein, 6 aa, Artificial Sequence
  source: /note="Description of Artificial Sequence: Synthetic Linker"
YAPRPR

SEQ ID NO: 5588 - protein, 7 aa, Artificial Sequence
  source: /note="Description of Artificial Sequence: Synthetic Linker"
YGPDGQR

SEQ ID NO: 5589 - protein, 9 aa, Artificial Sequence
  source: /note="Description of Artificial Sequence: Synthetic Linker"
VSQKTFPQL

SEQ ID NO: 5590 - protein, 17 aa, Artificial Sequence
  source: /note="Description of Artificial Sequence: Synthetic Linker"
GVSDDDAFEVGLTCGGI

SEQ ID NO: 5591 - protein, 4 aa, Artificial Sequence
  source: /note="Description of Artificial Sequence: Synthetic Linker"
FNDK

SEQ ID NO: 5592 - protein, 4 aa, Artificial Sequence
  source: /note="Description of Artificial Sequence: Synthetic Linker"
HDRN

SEQ ID NO: 5593 - protein, 5 aa, Artificial Sequence
  source: /note="Description of Artificial Sequence: Synthetic Linker"
KVKAD

SEQ ID NO: 5594 - protein, 6 aa, Artificial Sequence
  source: /note="Description of Artificial Sequence: Synthetic Linker"
EAGISS

SEQ ID NO: 5595 - protein, 6 aa, Artificial Sequence
  source: /note="Description of Artificial Sequence: Synthetic Linker"
IKASWA

SEQ ID NO: 5596 - protein, 6 aa, Artificial Sequence
  source: /note="Description of Artificial Sequence: Synthetic Linker"
LTRGFA

SEQ ID NO: 5597 - protein, 7 aa, Artificial Sequence
  source: /note="Description of Artificial Sequence: Synthetic Linker"
LNGRARA

SEQ ID NO: 5598 - protein, 7 aa, Artificial Sequence
  source: /note="Description of Artificial Sequence: Synthetic Linker"
SLATFDS

SEQ ID NO: 5599 - protein, 8 aa, Artificial Sequence
  source: /note="Description of Artificial Sequence: Synthetic Linker"
ALPEGHAK

SEQ ID NO: 5600 - protein, 8 aa, Artificial Sequence
  source: /note="Description of Artificial Sequence: Synthetic Linker"
ATTGVEGL

SEQ ID NO: 5601 - protein, 8 aa, Artificial Sequence
  source: /note="Description of Artificial Sequence: Synthetic Linker"
RPKSTEKL

SEQ ID NO: 5602 - protein, 9 aa, Artificial Sequence
  source: /note="Description of Artificial Sequence: Synthetic Linker"
YTSRKKTHE

SEQ ID NO: 5603 - protein, 10 aa, Artificial Sequence
  source: /note="Description of Artificial Sequence: Synthetic Linker"
ASPYHLGIND

SEQ ID NO: 5604 - protein, 10 aa, Artificial Sequence
  source: /note="Description of Artificial Sequence: Synthetic Linker"
GLQDWNVTPE

SEQ ID NO: 5605 - protein, 10 aa, Artificial Sequence
  source: /note="Description of Artificial Sequence: Synthetic Linker"
LDRKSGDYNQ

SEQ ID NO: 5606 - protein, 13 aa, Artificial Sequence
  source: /note="Description of Artificial Sequence: Synthetic Linker"
LLDRDLNLNLPPV

SEQ ID NO: 5607 - protein, 13 aa, Artificial Sequence
  source: /note="Description of Artificial Sequence: Synthetic Linker"
SEGLLPLDNHYHF

SEQ ID NO: 5608 - protein, 14 aa, Artificial Sequence
  source: /note="Description of Artificial Sequence: Synthetic Linker"
ESPVDSEQRGENDL

SEQ ID NO: 5609 - protein, 15 aa, Artificial Sequence
  source: /note="Description of Artificial Sequence: Synthetic Linker"
ALHDMNVELEEKTSH

SEQ ID NO: 5610 - protein, 15 aa, Artificial Sequence
  source: /note="Description of Artificial Sequence: Synthetic Linker"
VDKAPYRFTHGWTYS

SEQ ID NO: 5611 - protein, 16 aa, Artificial Sequence
  source: /note="Description of Artificial Sequence: Synthetic Linker"
HRGAHIYMNSWQSIDF

SEQ ID NO: 5612 - protein, 17 aa, Artificial Sequence
  source: /note="Description of Artificial Sequence: Synthetic Linker"
RENGLVRSPGGFPGEDL

SEQ ID NO: 5613 - protein, 18 aa, Artificial Sequence
  source: /note="Description of Artificial Sequence: Synthetic Linker"
VAGVGTRSSDGFQTSGDY

SEQ ID NO: 5614 - protein, 21 aa, Artificial Sequence
  source: /note="Description of Artificial Sequence: Synthetic Linker"
EIHVEQKLPQKLSAKAKELPI

SEQ ID NO: 5615 - protein, 6 aa, Artificial Sequence
  source: /note="Description of Artificial Sequence: Synthetic Linker"
RWQSFN

SEQ ID NO: 5616 - protein, 9 aa, Artificial Sequence
  source: /note="Description of Artificial Sequence: Synthetic Linker"
SLTARPGFL

SEQ ID NO: 5617 - protein, 10 aa, Artificial Sequence
  source: /note="Description of Artificial Sequence: Synthetic Linker"
LRIPFSEHLG

SEQ ID NO: 5618 - protein, 10 aa, Artificial Sequence
  source: /note="Description of Artificial Sequence: Synthetic Linker"
VVGGQQGSLE

SEQ ID NO: 5619 - protein, 13 aa, Artificial Sequence
  source: /note="Description of Artificial Sequence: Synthetic Linker"
DDFDKDTLNINFQ

SEQ ID NO: 5620 - protein, 13 aa, Artificial Sequence
  source: /note="Description of Artificial Sequence: Synthetic Linker"
YGRESLQSKFTQA

SEQ ID NO: 5621 - protein, 18 aa, Artificial Sequence
  source: /note="Description of Artificial Sequence: Synthetic Linker"
VEAPDLPQQEWAPTYEER

SEQ ID NO: 5622 - protein, 31 aa, Artificial Sequence
  source: /note="Description of Artificial Sequence: Synthetic Linker"
IGCPGDTQGDTYLSKGDKRVNEDAVRGLKAE

SEQ ID NO: 5623 - protein, 20 aa, Artificial Sequence
  source: /note="Description of Artificial Sequence: Synthetic Linker"
FQGYYLVSPSETFLERDVLK

SEQ ID NO: 5624 - protein, 6 aa, Artificial Sequence
  source: /note="Description of Artificial Sequence: Synthetic Linker"
GSGSGS

SEQ ID NO: 5625 - DNA, 18 bp, Artificial Sequence
  source: /note="Description of Artificial Sequence: Synthetic Linker"
ggatcaggttccggatcc

SEQ ID NO: 5626 - protein, 8 aa, Artificial Sequence
  source: /note="Description of Artificial Sequence: Synthetic Linker"
GSGSGSGS

SEQ ID NO: 5627 - DNA, 24 bp, Artificial Sequence
  source: /note="Description of Artificial Sequence: Synthetic Linker"
ggatctggttccggatcaggatcc

SEQ ID NO: 5628 - protein, 10 aa, Artificial Sequence
  source: /note="Description of Artificial Sequence: Synthetic Linker"
GSGSGGGSGS

SEQ ID NO: 5629 - DNA, 30 bp, Artificial Sequence
  source: /note="Description of Artificial Sequence: Synthetic Linker"
ggatcaggttccggaggtggatctggatcc

SEQ ID NO: 5630 - protein, 8 aa, Artificial Sequence
  source: /note="Description of Artificial Sequence: Synthetic Linker"
  MOD_RES (2)..(2): Any amino acid
  MOD_RES (4)..(4): Any amino acid
DXEXNPGP

SEQ ID NO: 5631 - protein, 7 aa, Artificial Sequence
  source: /note="Description of Artificial Sequence: Synthetic Linker"
SGSGSGS

SEQ ID NO: 5632 - protein, 10 aa, Artificial Sequence
  source: /note="Description of Artificial Sequence: Synthetic Linker"
  MOD_RES (3)..(4): Any amino acid
  MOD_RES (6)..(9): Any amino acid
HDXXHXXXXN

SEQ ID NO: 5633 - protein, 4 aa, Artificial Sequence
  source: /note="Description of Artificial Sequence: Synthetic Linker"
GSSG

SEQ ID NO: 5634 - DNA, 12 bp, Artificial Sequence
  source: /note="Description of Artificial Sequence: Synthetic Linker"
ggatccagcggc

SEQ ID NO: 5635 - DNA, 603 bp, Artificial Sequence
  source: /note="Description of Artificial Sequence: Synthetic Promoter sequence"
aagcttgggagttccgcgttacataacttacggtaaatggcccgcctggctgaccgcccaacgacccccgcccattgacgtcaataatgacgtatgttcccatagtaacgccaatagggactttccattgacgtcaatgggtggagtatttacggtaaactgcccacttggcagtacatcaagtgtatcatatgccaagtacgccccctattgacgtcaatgacggtaaatggcccgcctggcattatgcccagtacatgaccttatgggactttcctacttggcagtacatctacgtattagtcatcgctattaccatggtgatgcggttttggcagtacatcaatgggcgtggatagcggtttgactcacggggatttccaagtctccaccccattgacgtcaatgggagtttgttttggcaccaaaatcaacgggactttccaaaatgtcgtaacaactccgccccattgacgcaaatgggcggtaggcgtgtacggtgggaggtctatataagcagagctcgtttagtgaaccgtcagatcgcctggagacgccatccacgctgttttgacctccatagaagacaccgactctactaga

SEQ ID NO: 5636 - DNA, 603 bp, Artificial Sequence
  source: /note="Description of Artificial Sequence: Synthetic Promoter sequence"
aagcttgggagttccgcgttacataacttacggtaaatggcccgcctggctgaccgcccaacgacccccgcccattgacgtcaataatgacgtatgttcccatagtaacgccaatagggactttccattgacgtcaatgggtggagtatttacggtaaactgcccacttggcagtacatcaagtgtatcatatgccaagtacgccccctattgacgtcaatgacggtaaatggcccgcctggcattatgcccagtacatgaccttacgggactttcctacttggcagtacatctacgtattagtcatcgctattaccatggtgatgcggttttggcagtacaccaatgggcgtggatagcggtttgactcacggggatttccaagtctccaccccattgacgtcaatgggagtttgttttggcaccaaaatcaacgggactttccaaaatgtcgtaacaactccgccccattgacgcaaatgggcggtaggcgtgtacggtgggaggtctatataagcagagctcgtttagtgaaccgtcagatcgcctggagacgccatccacgctgttttgacctccatagaagacaccgactctactaga

SEQ ID NO: 5637 - DNA, 508 bp, Artificial Sequence
  source: /note="Description of Artificial Sequence: Synthetic Promoter sequence"
cgttacataacttacggtaaatggcccgcctggctgaccgcccaacgacccccgcccattgacgtcaataatgacgtatgttcccatagtaacgccaatagggactttccattgacgtcaatgggtggagtatttacggtaaactgcccacttggcagtacatcaagtgtatcatatgccaagtacgccccctattgacgtcaatgacggtaaatggcccgcctggcattatgcccagtacatgaccttatgggactttcctacttggcagtacatctacgtattagtcatcgctattaccatggtgatgcggttttggcagtacatcaatgggcgtggatagcggtttgactcacggggatttccaagtctccaccccattgacgtcaatgggagtttgttttggcaccaaaatcaacgggactttccaaaatgtcgtaacaactccgccccattgacgcaaatgggcggtaggcgtgtacggtgggaggtctatataagcagagct

SEQ ID NO: 5638 - DNA, 1339 bp, Artificial Sequence
  source: /note="Description of Artificial Sequence: Synthetic Promoter sequence"
cgatagtaattcatacaaaaggactcgcccctgccttggggaatcccagggaccgtcgttaaactcccactaacgtagaacccagagatcgctgcgttcccgccccctcacccgcccgctctcgtcatcactgaggtggagaagagcatgcgtgaggctccggtgcccgtcagtgggcagagcgcacatcgcccacagtccccgagaagttggggggaggggtcggcaattgaaccggtgcctagagaaggtggcgcggggtaaactgggaaagtgatgtcgtgtactggctccgcctttttcccgagggtgggggagaaccgtatataagtgcagtagtcgccgtgaacgttctttttcgcaacgggtttgccgccagaacacaggtaagtgccgtgtgtggttcccgcgggcctggcctctttacgggttatggcccttgcgtgccttgaattacttccacgcccctggctgcagtacgtgattcttgatcccgagcttcgggttggaagtgggtgggagagttcgaggccttgcgcttaaggagccccttcgcctcgtgcttgagttgaggcctggcttgggcgctggggccgccgcgtgcgaatctggtggcaccttcgcgcctgtctcgctgctttcgataagtctctagccatttaaaatttttgatgacctgctgcgacgctttttttctggcaagatagtcttgtaaatgcgggccaagatctgcacactggtatttcggtttttggggccgcgggcggcgacggggcccgtgcgtcccagcgcacatgttcggcgaggcggggcctgcgagcgcggccaccgagaatcggacgggggtagtctcaagctggccggcctgctctggtgcctggcctcgcgccgccgtgtatcgccccgccctgggcggcaaggctggcccggtcggcaccagttgcgtgagcggaaagatggccgcttcccggccctgctgcagggagctcaaaatggaggacgcggcgctcgggagagcgggcgggtgagtcacccacacaaaggaaaagggcctttccgtcctcagccgtcgcttcatgtgactccacggagtaccgggcgccgtccaggcacctcgattagttctcgagcttttggagtacgtcgtctttaggttggggggaggggttttatgcgatggagtttccccacactgagtgggtggagactgaagttaggccagcttggcacttgatgtaattctccttggaatttgccctttttgagtttggatcttggttcattctcaagcctcagacagtggttcaaagtttttttcttccatttcaggtgtcgtgag

SEQ ID NO: 5639 - DNA, 1335 bp, Artificial Sequence
  source: /note="Description of Artificial Sequence: Synthetic Promoter sequence"
gagtaattcatacaaaaggactcgcccctgccttggggaatcccagggaccgtcgttaaactcccactaacgtagaacccagagatcgctgcgttcccgccccctcacccgcccgctctcgtcatcactgaggtggagaagagcatgcgtgaggctccggtgcccgtcagtgggcagagcgcacatcgcccacagtccccgagaagttggggggaggggtcggcaattgaaccggtgcctagagaaggtggcgcggggtaaactgggaaagtgatgtcgtgtactggctccgcctttttcccgagggtgggggagaaccgtatataagtgcagtagtcgccgtgaacgttctttttcgcaacgggtttgccgccagaacacaggtaagtgccgtgtgtggttcccgcgggcctggcctctttacgggttatggcccttgcgtgccttgaattacttccacgcccctggctgcagtacgtgattcttgatcccgagcttcgggttggaagtgggtgggagagttcgaggccttgcgcttaaggagccccttcgcctcgtgcttgagttgaggcctggcttgggcgctggggccgccgcgtgcgaatctggtggcaccttcgcgcctgtctcgctgctttcgataagtctctagccatttaaaatttttgatgacctgctgcgacgctttttttctggcaagatagtcttgtaaatgcgggccaagatctgcacactggtatttcggtttttggggccgcgggcggcgacggggcccgtgcgtcccagcgcacatgttcggcgaggcggggcctgcgagcgcggccaccgagaatcggacgggggtagtctcaagctggccggcctgctctggtgcctggcctcgcgccgccgtgtatcgccccgccctgggcggcaaggctggcccggtcggcaccagttgcgtgagcggaaagatggccgcttcccggccctgctgcagggagctcaaaatggaggacgcggcgctcgggagagcgggcgggtgagtcacccacacaaaggaaaagggcctttccgtcctcagccgtcgcttcatgtgactccacggagtaccgggcgccgtccaggcacctcgattagttctcgagcttttggagtacgtcgtctttaggttggggggaggggttttatgcgatggagtttccccacactgagtgggtggagactgaagttaggccagcttggcacttgatgtaattctccttggaatttgccctttttgagtttggatcttggttcattctcaagcctcagacagtggttcaaagtttttttcttccatttcaggtgtcgtga

SEQ ID NO: 5640 - DNA, 1184 bp, Artificial Sequence
  source: /note="Description of Artificial Sequence: Synthetic Promoter sequence"
cgtgaggctccggtgcccgtcagtgggcagagcgcacatcgcccacagtccccgagaagttggggggaggggtcggcaattgaaccggtgcctagagaaggtggcgcggggtaaactgggaaagtgatgtcgtgtactggctccgcctttttcccgagggtgggggagaaccgtatataagtgcagtagtcgccgtgaacgttctttttcgcaacgggtttgccgccagaacacaggtaagtgccgtgtgtggttcccgcgggcctggcctctttacgggttatggcccttgcgtgccttgaattacttccacctggctgcagtacgtgattcttgatcccgagcttcgggttggaagtgggtgggagagttcgaggccttgcgcttaaggagccccttcgcctcgtgcttgagttgaggcctggcctgggcgctggggccgccgcgtgcgaatctggtggcaccttcgcgcctgtctcgctgctttcgataagtctctagccatttaaaatttttgatgacctgctgcgacgctttttttctggcaagatagtcttgtaaatgcgggccaagatctgcacactggtatttcggtttttggggccgcgggcggcgacggggcccgtgcgtcccagcgcacatgttcggcgaggcggggcctgcgagcgcggccaccgagaatcggacgggggtagtctcaagctggccggcctgctctggtgcctggcctcgcgccgccgtgtatcgccccgccctgggcggcaaggctggcccggtcggcaccagttgcgtgagcggaaagatggccgcttcccggccctgctgcagggagctcaaaatggaggacgcggcgctcgggagagcgggcgggtgagtcacccacacaaaggaaaagggcctttccgtcctcagccgtcgcttcatgtgactccacggagtaccgggcgccgtccaggcacctcgattagttctcgagcttttggagtacgtcgtctttaggttggggggaggggttttatgcgatggagtttccccacactgagtgggtggagactgaagttaggccagcttggcacttgatgtaattctccttggaatttgccctttttgagtttggatcttggttcattctcaagcctcagacagtggttcaaagtttttttcttccatttcaggtgtcgtga

SEQ ID NO: 5641 - DNA, 1184 bp, Artificial Sequence
  source: /note="Description of Artificial Sequence: Synthetic Promoter sequence"
cgtgaggctccggtgcccgtcagtgggcagagcgcacatcgcccacagtccccgagaagttggggggaggggtcggcaattgaaccggtgcctagagaaggtggcgcggggtaaactgggaaagtgatgtcgtgtactggctccgcctttttcccgagggtgggggagaaccgtatataagtgcagtagtcgccgtgaacgttctttttcgcaacgggtttgccgccagaacacaggtaagtgccgtgtgtggttcccgcgggcctggcctctttacgggttatggcccttgcgtgccttgaattacttccacctggctgcagtacgtgattcttgatcccgagcttcgggttggaagtgggtgggagagttcgaggccttgcgcttaaggagccccttcgcctcgtgcttgagttgaggcctggcctgggcgctggggccgccgcgtgcgaatctggtggcaccttcgcgcctgtctcgctgctttcgataagtctctagccatttaaaatttttgatgacctgctgcgacgctttttttctggcaagatagtcttgtaaatgcgggccaagatctgcacactggtatttcggtttttggggccgcgggcggcgacggggcccgtgcgtcccagcgcacatgttcggcgaggcggggcctgcgagcgcggccaccgagaatcggacgggggtagtctcaagctggccggcctgctctggtgcctggcctcgcgccgccgtgtatcgccccgccctgggcggcaaggctggcccggtcggcaccagttgcgtgagcggaaagatggccgcttcccggccctgctgcagggagctcaaaatggaggacgcggcgctcgggagagcgggcgggtgagtcacccacacaaaggaaaagggcctttccgtcctcagccgtcgcttcatgtgactccactgagtaccgggcgccgtccaggcacctcgattagttctcgtgcttttggagtacgtcgtctttaggttggggggaggggttttatgcgatggagtttccccacactgagtgggtggagactgaagttaggccagcttggcacttgatgtaattctccttggaatttgccctttttgagtttggatcttggttcattctcaagcctcagacagtggttcaaagtttttttcttccatttcaggtgtcgtga

SEQ ID NO: 5642 - DNA, 1184 bp, Artificial Sequence
  source: /note="Description of Artificial Sequence: Synthetic Promoter sequence"
cgtgaggctccggtgcccgtcagtgggcagagcgcacatcgcccacagtccccgagaagttggggggaggggtcggcaattgaaccggtgcctagagaaggtggcgcggggtaaactgggaaagtgatgtcgtgtactggctccgcctttttcccgagggtgggggagaaccgtatataagtgcagtagtcgccgtgaacgttctttttcgcaacgggtttgccgccagaacacaggtaagtgccgtgtgtggttcccgcgggcctggcctctttacgggttatggcccttgcgtgccttgaattacttccacctggctgcagtacgtgattcttgatcccgagcttcgggttggaagtgggtgggagagttcgaggccttgcgcttaaggagccccttcgcctcgtgcttgagttgaggcctggcctgggcgctggggccgccgcgtgcgaatctggtggcaccttcgcgcctgtctcgctgctttcgataagtctctagccatttaaaatttttgatgacctgctgcgacgctttttttctggcaagatagtcttgtaaatgcgggccaagatctgcacactggtatttcggtttttggggccgcgggcggcgacggggcccgtgcgtcccagcgcacatgttcggcgaggcggggcctgcgagcgcggccaccgagaatcggacgggggtagtctcaagctggccggcctgctctggtgcctggcctcgcgccgccgtgtatcgccccgccctgggcggcaaggctggcccggtcggcaccagttgcgtgagcggaaagatggccgcttcccggccctgctgcagggagctcaaaatggaggacgcggcgctcgggagagcgggcgggtgagtcacccacacaaaggaaaagggcctttccgtcctcagccgtcgcttcatgtgactccactgagtaccgggcgccgtccaggcacctcgattagttctcgagcttttggagtacgtcgtctttaggttggggggaggggttttatgcgatggagtttccccacactgagtgggtggagactgaagttaggccagcttggcacttgatgtaattctccttggaatttgccctttttgagtttggatcttggttcattctcaagcctcagacagtggttcaaagtttttttcttccatttcaggtgtcgtga

SEQ ID NO: 5643 - DNA, 521 bp, Artificial Sequence
  source: /note="Description of Artificial Sequence: Synthetic Promoter sequence"
acccctctctccagccactaagccagttgctccctcggctgacggctgcacgcgaggcctccgaacgtcttacgccttgtggcgcgcccgtccttgtcccgggtgtgatggcggggtgtggggcggagggcgtggcggggaagggccggcgacgagagccgcgcgggacgactcgtcggcgataaccggtgtcgggtagcgccagccgcgcgacggtaacgagggaccgcgacaggcagacgctcccatgatcactctgcacgccgaaggcaaatagtgcaggccgtgcggcgcttggcgttccttggaagggctgaatccccgcctcgtccttcgcagcggccccccgggtgttcccatcgccgcttctaggcccactgcgacgcttgcctgcacttcttacacgctctgggtcccagccgcggcgacgcaaagggccttggtgcgggtctcgtcggcgcagggacgcgtttgggtcccgacggaaccttttccgcgttggggttggggcaccataagct

SEQ ID NO: 5644 - DNA, 118 bp, Artificial Sequence
  source: /note="Description of Artificial Sequence: Synthetic Promoter sequence"
acccctctctccagccactaagccagttgctccctcggctgacggctgcacgcgaggcctccgaacgtcttacgccttgtggcgcgcccgtccttgtcccgggtgtgatggcggggtg

SEQ ID NO: 5645 - DNA, 221 bp, Artificial Sequence
  source: /note="Description of Artificial Sequence: Synthetic Promoter sequence"
acccctctctccagccactaagccagttgctccctcggctgacggctgcacgcgaggcctccgaacgtcttacgccttgtggcgcgcccgtccttgtcccgggtgtgatggcggggtgtggggcggagggcgtggcggggaagggccggcgacgagagccgcgcgggacgactcgtcggcgataaccggtgtcgggtagcgccagccgcgcgacggtaacg

SEQ ID NO: 5646 - DNA, 324 bp, Artificial Sequence
  source: /note="Description of Artificial Sequence: Synthetic Promoter sequence"
acccctctctccagccactaagccagttgctccctcggctgacggctgcacgcgaggcctccgaacgtcttacgccttgtggcgcgcccgtccttgtcccgggtgtgatggcggggtgtggggcggagggcgtggcggggaagggccggcgacgagagccgcgcgggacgactcgtcggcgataaccggtgtcgggtagcgccagccgcgcgacggtaacgagggaccgcgacaggcagacgctcccatgatcactctgcacgccgaaggcaaatagtgcaggccgtgcggcgcttggcgttccttggaagggctgaatccccg

SEQ ID NO: 5647 - DNA, 422 bp, Artificial Sequence
  source: /note="Description of Artificial Sequence: Synthetic Promoter sequence"
acccctctctccagccactaagccagttgctccctcggctgacggctgcacgcgaggcctccgaacgtcttacgccttgtggcgcgcccgtccttgtcccgggtgtgatggcggggtgtggggcggagggcgtggcggggaagggccggcgacgagagccgcgcgggacgactcgtcggcgataaccggtgtcgggtagcgccagccgcgcgacggtaacgagggaccgcgacaggcagacgctcccatgatcactctgcacgccgaaggcaaatagtgcaggccgtgcggcgcttggcgttccttggaagggctgaatccccgcctcgtccttcgcagcggccccccgggtgttcccatcgccgcttctaggcccactgcgacgcttgcctgcacttcttacacgctctgggtcccagccg

SEQ ID NO: 5648 - DNA, 512 bp, Artificial Sequence
  source: /note="Description of Artificial Sequence: Synthetic Promoter sequence"
atcgatgggtaggggaggcgcttttcccaaggcagtctggagcatgcgctttagcagccccgctgggcacttggcgctacacaagtggcctctggcctcgcacacattccacatccaccggtaggcgccaaccggctccgttctttggtggccccttcgcgccaccttctactcctcccctagtcaggaagttcccccccgccccgcagctcgcgtcgtgcaggacgtgacaaatggaagtagcacgtctcactagtctcgtgcagatggacagcaccgctgagcaatggaagcgggtaggcctttggggcagcggccaatagcagctttgctccttcgctttctgggctcagaggctgggaaggggtgggtccgggggcgggctcaggggcgggctcaggggcggggcgggcgcccgaaggtcctccggaggcccggcattctgcacgcttcaaaagcgcacgtctgccgcgctgttctcctcttcctcatctccgggcctttcgctcgag

SEQ ID NO: 5649 - DNA, 507 bp, Artificial Sequence
  source: /note="Description of Artificial Sequence: Synthetic Promoter sequence"
atcgatgggtaggggaggcgcttttcccaaggcagtctggagcatgcgctttagcagccccgctgggcacttggcgctacacaagtggcctctggcctcgcacacattccacatccaccggtaggcgccaaccggctccgttctttggtggccccttcgcgccaccttctactcctcccctagtcaggaagttcccccccgccccgcagctcgcgtcgtgcaggacgtgacaaatggaagtagcacgtctcactagtctcgtgcagatggacagcaccgctgagcaatggaagcgggtaggcctttggggcagcggccaatagcagctttgctccttcgctttctgggctcagaggctgggaaggggtgggtccgggggcgggctcaggggcgggctcaggggcggggcgggcgcccgaaggtcctccggaggcccggcattctgcacgcttcaaaagcgcacgtctgccgcgctgttctcctcttcctcatctccgggcctttcgc

SEQ ID NO: 5650 - DNA, 399 bp, Artificial Sequence
  source: /note="Description of Artificial Sequence: Synthetic Promoter sequence"
ccggtaggcgccaaccggctccgttctttggtggccccttcgcgccaccttctactcctcccctagtcaggaagttcccccccgccccgcagctcgcgtcgtgcaggacgtgacaaatggaagtagcacgtctcactagtctcgtgcagatggacagcaccgctgagcaatggaagcgggtaggcctttggggcagcggccaatagcagctttgctccttcgctttctgggctcagaggctgggaaggggtgggtccgggggcgggctcaggggcgggctcaggggcggggcgggcgcccgaaggtcctccggaggcccggcattctgcacgcttcaaaagcgcacgtctgccgcgctgttctcctcttcctcatctccgggcctttcgacctgcagcc

SEQ ID NO: 5651 - protein, 259 aa, Artificial Sequence
  source: /note="Description of Artificial Sequence: Synthetic Destabilizing Domain (DD)"
SHHWGYGKHNGPEHWHKDFPIAKGERQSPVDIDTHTAKYDPSLKPLSVSYDQATSLRILNNGHAFNVEFDDSQDKAVLKGGPLDGTYRLIQFHFHWGSLDGQGSEHTVDKKKYAAELHLVHWNTKYGDFGKAVQQPDGLAVLGIFLKVGSAKPGLQKVVDVLDSIKTKGKSADFTNFDPRGLLPESLDYWTYPGSLTTPPLLECVTWIVLKEPISVSSEQVLKFRKLNFNGEGEPEELMVDNWRPAQPLKNRQIKASFK

SEQ ID NO: 5652 - DNA, 777 bp, Artificial Sequence
  source: /note="Description of Artificial Sequence: Synthetic Destabilizing Domain (DD)"
tcccatcactgggggtacggcaaacacaacggacctgagcactggcataaggacttccccattgccaagggagagcgccagtcccctgttgacatcgacactcatacagccaagtatgacccttccctgaagcccctgtctgtttcctatgatcaagcaacttccctgaggatcctcaacaatggtcatgctttcaacgtggagtttgatgactctcaggacaaagcagtgctcaagggaggacccctggatggcacttacagattgattcagtttcactttcactggggttcacttgatggacaaggttcagagcatactgtggataaaaagaaatatgctgcagaacttcacttggttcactggaacaccaaatatggggattttgggaaagctgtgcagcaacctgatggactggccgttctaggtatttttttgaaggttggcagcgctaaaccgggccttcagaaagttgttgatgtgctggattccattaaaacaaagggcaagagtgctgacttcactaacttcgatcctcgtggcctccttcctgaatccctggattactggacctacccaggctcactgaccacccctcctcttctggaatgtgtgacctggattgtgctcaaggaacccatcagcgtcagcagcgagcaggtgttgaaattccgtaaacttaacttcaatggggagggtgaacccgaagaactgatggtggacaactggcgcccagctcagccactgaagaacaggcaaatcaaagcttccttcaaa

SEQ ID NO: 5653 - protein, 259 aa, Artificial Sequence
  source: /note="Description of Artificial Sequence: Synthetic Destabilizing Domain (DD)"
SHHWGYGKHNGPEHWHKDFPIAKGERQSPVDIDTHTAKYDPSLKPLSVSYDQATSLRILNNGHAFNVEFDDSQDKAVLKGGPLDGTYRLIQFHFHWGSLDGQGSEHTVDKKKYAAELHLVHWNTKYGDFGKAVQQPDGLAVLGIFLKVGSAKPGLQKVVDVLDSIKTKGKSADFTNFDPRGLLPESLDYWTYPGSLTTPPLLECVTSIVLKEPISVSSEQVLKFRKLNFNGEGEPEELMVDNWRPAQPLKNRQIKASFK

SEQ ID NO: 5654 - DNA, 777 bp, Artificial Sequence
  source: /note="Description of Artificial Sequence: Synthetic Destabilizing Domain (DD)"
tcccatcactgggggtacggcaaacacaacggacctgagcactggcataaggacttccccattgccaagggagagcgccagtcccctgttgacatcgacactcatacagccaagtatgacccttccctgaagcccctgtctgtttcctatgatcaagcaacttccctgaggatcctcaacaatggtcatgctttcaacgtggagtttgatgactctcaggacaaagcagtgctcaagggaggacccctggatggcacttacagattgattcagtttcactttcactggggttcacttgatggacaaggttcagagcatactgtggataaaaagaaatatgctgcagaacttcacttggttcactggaacaccaaatatggggattttgggaaagctgtgcagcaacctgatggactggccgttctaggtatttttttgaaggttggcagcgctaaaccgggccttcagaaagttgttgatgtgctggattccattaaaacaaagggcaagagtgctgacttcactaacttcgatcctcgtggcctccttcctgaatccctggattactggacctacccaggctcactgaccacccctcctcttctggaatgtgtgaccagcattgtgctcaaggaacccatcagcgtcagcagcgagcaggtgttgaaattccgtaaacttaacttcaatggggagggtgaacccgaagaactgatggtggacaactggcgcccagctcagccactgaagaacaggcaaatcaaagcttccttcaaa

SEQ ID NO: 5655 - protein, 259 aa, Artificial Sequence
  source: /note="Description of Artificial Sequence: Synthetic Destabilizing Domain (DD)"
SHHWGYGKHNGPEHWHKDFPIAKGERQSPVDIDTHTAKYDPSLKPLSVSNDQATSLRILNNGHAFNVEFDDSQDKAVLKGGPLDGTYRLIQFHFHWGSLDGQGSEHTVDKKKYAAELHLVHWNTKYGDFGKAVQQPDGLAVLGIFLKVGSAKPGLQKVVDVLDSIKTKGKSADFTNFDPRGLLPESLDYWTYPGSLTTPPLLECVTWIVLKEPISVSSEQVLKFRKLNFNGEGEPEELMVDNWRPAQPLKNRQIKASFK

SEQ ID NO: 5656 - DNA, 777 bp, Artificial Sequence
  source: /note="Description of Artificial Sequence: Synthetic Destabilizing Domain (DD)"
tcccatcactgggggtacggcaaacacaacggacctgagcactggcataaggacttccccattgccaagggagagcgccagtcccctgttgacatcgacactcatacagccaagtatgacccttccctgaagcccctgtctgtttccaatgatcaagcaacttccctgaggatcctcaacaatggtcatgctttcaacgtggagtttgatgactctcaggacaaagcagtgctcaagggaggacccctggatggcacttacagattgattcagtttcactttcactggggttcacttgatggacaaggttcagagcatactgtggataaaaagaaatatgctgcagaacttcacttggttcactggaacaccaaatatggggattttgggaaagctgtgcagcaacctgatggactggccgttctaggtatttttttgaaggttggcagcgctaaaccgggccttcagaaagttgttgatgtgctggattccattaaaacaaagggcaagagtgctgacttcactaacttcgatcctcgtggcctccttcctgaatccctggattactggacctacccaggctcactgaccacccctcctcttctggaatgtgtgacctggattgtgctcaaggaacccatcagcgtcagcagcgagcaggtgttgaaattccgtaaacttaacttcaatggggagggtgaacccgaagaactgatggtggacaactggcgcccagctcagccactgaagaacaggcaaatcaaagcttccttcaaa

SEQ ID NO: 5657 - protein, 259 aa, Artificial Sequence
  source: /note="Description of Artificial Sequence: Synthetic Destabilizing Domain (DD)"
SHHWGYGKHNGPEHWHKDFPIAKGERQSPVDIDTHTAKYDPSLKPLSVSYDQATNLRILNNGHAFNVEFDDSQDKAVLKGGPLDGTYRLIQFHFHWGSLDGQGSEHTVDKKKYAAELHLVHWNTKYGDFGKAVQQPDGLAVLGIFLKVGSAKPGLQKVVDVLDSIKTKGKSADFTNFDPRGLLPESLDYWTYPGSLTTPPLLECVTWIVLKEPISVSSEQVLKFRKLNFNGEGEPEELMVDNWRPAQPLKNRQIKASFK

SEQ ID NO: 5658 - DNA, 777 bp, Artificial Sequence
  source: /note="Description of Artificial Sequence: Synthetic Destabilizing Domain (DD)"
tcccatcactgggggtacggcaaacacaacggacctgagcactggcataaggacttccccattgccaagggagagcgccagtcccctgttgacatcgacactcatacagccaagtatgacccttccctgaagcccctgtctgtttcctatgatcaagcaactaatctgaggatcctcaacaatggtcatgctttcaacgtggagtttgatgactctcaggacaaagcagtgctcaagggaggacccctggatggcacttacagattgattcagtttcactttcactggggttcacttgatggacaaggttcagagcatactgtggataaaaagaaatatgctgcagaacttcacttggttcactggaacaccaaatatggggattttgggaaagctgtgcagcaacctgatggactggccgttctaggtatttttttgaaggttggcagcgctaaaccgggccttcagaaagttgttgatgtgctggattccattaaaacaaagggcaagagtgctgacttcactaacttcgatcctcgtggcctccttcctgaatccctggattactggacctacccaggctcactgaccacccctcctcttctggaatgtgtgacctggattgtgctcaaggaacccatcagcgtcagcagcgagcaggtgttgaaattccgtaaacttaacttcaatggggagggtgaacccgaagaactgatggtggacaactggcgcccagctcagccactgaagaacaggcaaatcaaagcttccttcaaa

SEQ ID NO: 5659 - protein, 259 aa, Artificial Sequence
  source: /note="Description of Artificial Sequence: Synthetic Destabilizing Domain (DD)"
SHHWGYGKHNGPEHWHKDFPIAKGERQSPVDIDTHTAKYDPSLKPLSVSTDQATSLRILNNGHAFNVEFDDSQDKAVLKGGPLDGTYRLIQFHFHWGSLDGQGSEHTVDKKKYAAELHLVHWNTKYGDFGKAVQQPDGLAVLGIFLKVGSAKPGLQKVVDVLDSIKTKGKSADFTNFDPRGLLPESLDYWTYPGSLTTPPLLECVTWIVLKEPISVSSEQVLKFRKLNFNGEGEPEELMVDNWRPAQPLKNRQIKASFK

SEQ ID NO: 5660 - DNA, 777 bp, Artificial Sequence
  source: /note="Description of Artificial Sequence: Synthetic Destabilizing Domain (DD)"
tcccatcactgggggtacggcaaacacaacggacctgagcactggcataaggacttccccattgccaagggagagcgccagtcccctgttgacatcgacactcatacagccaagtatgacccttccctgaagcccctgtctgtttccactgatcaagcaacttccctgaggatcctcaacaatggtcatgctttcaacgtggagtttgatgactctcaggacaaagcagtgctcaagggaggacccctggatggcacttacagattgattcagtttcactttcactggggttcacttgatggacaaggttcagagcatactgtggataaaaagaaatatgctgcagaacttcacttggttcactggaacaccaaatatggggattttgggaaagctgtgcagcaacctgatggactggccgttctaggtatttttttgaaggttggcagcgctaaaccgggccttcagaaagttgttgatgtgctggactccattaaaacaaagggcaagagtgctgacttcactaacttcgatcctcgtggcctccttcctgaatccctggattactggacctacccaggctcactgaccacccctcctcttctggaatgtgtgacctggattgtgctcaaggaacccatcagcgtcagcagcgagcaggtgttgaaattccgtaaacttaacttcaatggggagggtgaacccgaagaactgatggtggacaactggcgcccagctcagccactgaagaacaggcaaatcaaagcttccttcaaa

SEQ ID NO: 5661 - DNA, 777 bp, Artificial Sequence
  source: /note="Description of Artificial Sequence: Synthetic Destabilizing Domain (DD)"
tcccatcactgggggtacggcaaacacaacggacctgagcactggcataaggacttccccattgccaagggagagcgccagtcccctgttgacatcgacactcatacagccaagtatgacccttccctgaagcccctgtctgtttccactgatcaagcaacttccctgaggatcctcaacaatggtcatgctttcaacgtggagtttgatgactctcaggacaaagcagtgctcaagggaggacccctggatggcacttacagattgattcagtttcactttcactggggttcacttgatggacaaggttcagagcatactgtggataaaaagaaatatgctgcagaacttcacttggttcactggaacaccaaatatggggattttgggaaagctgtgcagcaacctgatggactggccgttctaggtatttttttgaaggttggcagcgctaaaccgggccttcagaaagttgttgatgtgctggattccattaaaacaaagggcaagagtgctgacttcactaacttcgatcctcgtggcctccttcctgaatccctggattactggacctacccaggctcactgaccacccctcctcttctggaatgtgtgacctggattgtgctcaaggaacccatcagcgtcagcagcgagcaggtgttgaaattccgtaaacttaacttcaatggggagggtgaacccgaagaactgatggtggacaactggcgcccagctcagccactgaagaacaggcaaatcaaagcttccttcaaa

SEQ ID NO: 5662 - protein, 259 aa, Artificial Sequence
  source: /note="Description of Artificial Sequence: Synthetic Destabilizing Domain (DD)"
SHHWGYGKHNGPEHWHKDFPIAKGERQSPVDIDTHTAKYDPSLKPLSVSYDQATSLRILNNGHAFNVEFDFSQDKAVLKGGPLDGTYRLIQFHFHWGSLDGQGSEHTVDKKKYAAELHLVHWNTKYGDFGKAVQQPDGLAVLGIFLKVGSAKPGLQKVVDVLDSIKTKGKSADFTNFDPRGLLPESLDYWTYPGSLTTPPLLECVTWIVLKEPISVSSEQVLKFRKLNFNGEGEPEELMFDNWRPAQLLKNRQIKASFK

SEQ ID NO: 5663 - DNA, 777 bp, Artificial Sequence
  source: /note="Description of Artificial Sequence: Synthetic Destabilizing Domain (DD)"
tcccatcactgggggtacggcaaacacaacggacctgagcactggcataaggacttccccattgccaagggagagcgccagtcccctgttgacatcgacactcatacagccaagtatgacccttccctgaagcccctgtctgtttcctatgatcaagcaacttccctgaggatcctcaacaatggtcatgctttcaacgtggagtttgatttttctcaggacaaagcagtgctcaagggaggacccctggatggcacttacagattgattcagtttcactttcactggggttcacttgatggacaaggttcagagcatactgtggataaaaagaaatatgctgcagaacttcacttggttcactggaacaccaaatatggggattttgggaaagctgtgcagcaacctgatggactggccgttctaggtatttttttgaaggttggcagcgctaaaccgggccttcagaaagttgttgatgtgctggattccattaaaacaaagggcaagagtgctgacttcactaacttcgatcctcgtggcctccttcctgaatccctggattactggacctacccaggctcactgaccacccctcctcttctggaatgtgtgacctggattgtgctcaaggaacccatcagcgtcagcagcgagcaggtgttgaaattccgtaaacttaacttcaatggggagggtgaacccgaagaactgatgtttgacaactggcgcccagctcagttgctgaagaacaggcaaatcaaagcttccttcaaa

SEQ ID NO: 5664 - protein, 259 aa, Artificial Sequence
  source: /note="Description of Artificial Sequence: Synthetic Destabilizing Domain (DD)"
SHHWGYGKHNGPEHWHKDFPIAKGERQSPVDIDTHTAKYDPSLKPLSVSYDQATSLRILNNGHAFNVEFFDSQDKAVLKGGPLDGTYRLIQFHFHWGSLDGQGSEHTVDKKKYAAELHLVHWNTKYGDFGKAVQQPDGLAVLGIFLKVGSAKPGLQKVVDVLDSIKTKGKSADFTNFDPRGLLPESLDYWTYPGSLTTPPLLECVTWIVLKEPISVSSEQVLKFRKLNFFGEGEPEELMVDNWRPAQPLKNRQIKASFK

SEQ ID NO: 5665 - DNA, 777 bp, Artificial Sequence
  source: /note="Description of Artificial Sequence: Synthetic Destabilizing Domain (DD)"
tcccatcactgggggtacggcaaacacaacggacctgagcactggcataaggacttccccattgccaagggagagcgccagtcccctgttgacatcgacactcatacagccaagtatgacccttccctgaagcccctgtctgtttcctatgatcaagcaacttccctgaggatcctcaacaatggtcatgctttcaacgtggagttttttgactctcaggacaaagcagtgctcaagggaggacccctggatggcacttacagattgattcagtttcactttcactggggttcacttgatggacaaggttcagagcatactgtggataaaaagaaatatgctgcagaacttcacttggttcactggaacaccaaatatggggattttgggaaagctgtgcagcaacctgatggactggccgttctaggtatttttttgaaggttggcagcgctaaaccgggccttcagaaagttgttgatgtgctggattccattaaaacaaagggcaagagtgctgacttcactaacttcgatcctcgtggcctccttcctgaatccctggattactggacctacccaggctcactgaccacccctcctcttctggaatgtgtgacctggattgtgctcaaggaacccatcagcgtcagcagcgagcaggtgttgaaattccgtaaacttaacttctttggggagggtgaacccgaagaactgatggtggacaactggcgcccagctcagccactgaagaacaggcaaatcaaagcttccttcaaa

SEQ ID NO: 5666 - protein, 259 aa, Artificial Sequence
  source: /note="Description of Artificial Sequence: Synthetic Destabilizing Domain (DD)"
SHHWGYGKHNGPEHWHKDFPIAKGERQSPVDIDTHTAKYDPSLKPLSVSYDQATFLRILNNGHAFNVEFDDSQDKAVLKGGPLDGTYRLIQFHFHWGSLDGQGSEHTVDKKKYAAELHLVHWNTKYGDFGKAVQQPDGLAVLGIFLKVGSAKPGLQKVVDVLDSIKTKGKSADFTNFDPRGLLPESLDYWTYPGSLTTPPLLECVTWIVLKEPISVSSEQVLKFRKLNFNGEGEPEELMVDNWRPAQPLKNRQIKASFK

SEQ ID NO: 5667 - DNA, 777 bp, Artificial Sequence
  source: /note="Description of Artificial Sequence: Synthetic Destabilizing Domain (DD)"
tcccatcactgggggtacggcaaacacaacggacctgagcactggcataaggacttccccattgccaagggagagcgccagtcccctgttgacatcgacactcatacagccaagtatgacccttccctgaagcccctgtctgtttcctatgatcaagcaacttttctgaggatcctcaacaatggtcatgctttcaacgtggagtttgatgactctcaggacaaagcagtgctcaagggaggacccctggatggcacttacagattgattcagtttcactttcactggggttcacttgatggacaaggttcagagcatactgtggataaaaagaaatatgctgcagaacttcacttggttcactggaacaccaaatatggggattttgggaaagctgtgcagcaacctgatggactggccgttctaggtatttttttgaaggttggcagcgctaaaccgggccttcagaaagttgttgatgtgctggattccattaaaacaaagggcaagagtgctgacttcactaacttcgatcctcgtggcctccttcctgaatccctggattactggacctacccaggctcactgaccacccctcctcttctggaatgtgtgacctggattgtgctcaaggaacccatcagcgtcagcagcgagcaggtgttgaaattccgtaaacttaacttcaatggggagggtgaacccgaagaactgatggtggacaactggcgcccagctcagccactgaagaacaggcaaatcaaagcttccttcaaa

SEQ ID NO: 5668 - DNA, 777 bp, Artificial Sequence
  source: /note="Description of Artificial Sequence: Synthetic Destabilizing Domain (DD)"
tcccatcactgggggtacggcaaacacaacggacctgagcactggcataaggacttccccattgccaagggagagcgccagtcccctgttgacatcgacactcatacagccaagtatgacccttccctgaagcccctgtctgtttcctatgatcaagcaacttttctaaggatcctcaacaatggtcatgctttcaacgtggagtttgatgactctcaggacaaagcagtgctcaagggaggacccctggatggcacttacagattgattcagtttcactttcactggggttcacttgatggacaaggttcagagcatactgtggataaaaagaaatatgctgcagaacttcacttggttcactggaacaccaaatatggggattttgggaaagctgtgcagcaacctgatggactggccgttctaggtatttttttgaaggttggcagcgctaaaccgggccttcagaaagttgttgatgtgctggattccattaaaacaaagggcaagagtgctgacttcactaacttcgatcctcgtggcctccttcctgaatccctggattactggacctacccaggctcactgaccacccctcctcttctggaatgtgtgacctggattgtgctcaaggaacccatcagcgtcagcagcgagcaggtgttgaaattccgtaaacttaacttcaatggggagggtgaacccgaagaactgatggtggacaactggcgcccagctcagccactgaagaacaggcaaatcaaagcttccttcaaa

SEQ ID NO: 5669 - protein, 259 aa, Artificial Sequence
  source: /note="Description of Artificial Sequence: Synthetic Destabilizing Domain (DD)"
SHHWGYGKHNGPEHWHKDFPIAKGERQSPVDIDTHTAKYDPSLKPLSVSYDQATSLRILNNGHAFNVEFLDSQDKAVLKGGPLDGNYRLIQFHFHWGSLDGQGSEHTVDKKKYAAELHLVHWNTKYGDFGKAVQQPDGLAVLGIFLKVGSAKPGLQKVVDVLDSIKTKGKSADFTNFDPRGLLPESLDYWTYPGSLTTPPLLECVTWIVLKEPISVSSEQVLKFRKLNFNGEGEPEELMVDNWRPAQPRKNRQIKASFK

SEQ ID NO: 5670 - DNA, 777 bp, Artificial Sequence
  source: /note="Description of Artificial Sequence: Synthetic Destabilizing Domain (DD)"
tcccatcactgggggtacggcaaacacaacggacctgagcactggcataaggacttccccattgccaagggagagcgccagtcccctgttgacatcgacactcatacagccaagtatgacccttccctgaagcccctgtctgtttcctatgatcaagcaacttccctgaggatcctcaacaatggtcatgctttcaacgtggagtttttggactctcaggacaaagcagtgctcaagggaggacccctggatggcaattacagattgattcagtttcactttcactggggttcacttgatggacaaggttcagagcatactgtggataaaaagaaatatgctgcagaacttcacttggttcactggaacaccaaatatggggattttgggaaagctgtgcagcaacctgatggactggccgttctaggtatttttttgaaggttggcagcgctaaaccgggccttcagaaagttgttgatgtgctggattccattaaaacaaagggcaagagtgctgacttcactaacttcgatcctcgtggcctccttcctgaatccctggattactggacctacccaggctcactgaccacccctcctcttctggaatgtgtgacctggattgtgctcaaggaacccatcagcgtcagcagcgagcaggtgttgaaattccgtaaacttaacttcaatggggagggtgaacccgaagaactgatggtggacaactggcgcccagctcagccacggaagaacaggcaaatcaaagcttccttcaaa

SEQ ID NO: 5671 - protein, 259 aa, Artificial Sequence
  source: /note="Description of Artificial Sequence: Synthetic Destabilizing Domain (DD)"
SHHWGYGKHNGPEHWHKDFPIAKGERQSPVDIDTHTAKYDPSLKPLSVSYDQATSLRILNNGHAFNVEFDDSQDKAVLKGGPLDGTYRLIQFHFHWGSLDGQGSEHTVDKKKYAAELHLVHWNTKYGDFGKAVQQPDGLAVLGIFLKVGSAKPGLQKVVDVLDSIKTKGKSADFTNFDPRGSLPESLDYWTYPGSLTTPPLLECVTWIVLKEPISVSSEQVLKFRKLNFNGEGEPEELMVDNWRPAQPLKNRQIKASFK

SEQ ID NO: 5672 - DNA, 777 bp, Artificial Sequence
  source: /note="Description of Artificial Sequence: Synthetic Destabilizing Domain (DD)"
tcccatcactgggggtacggcaaacacaacggacctgagcactggcataaggacttccccattgccaagggagagcgccagtcccctgttgacatcgacactcatacagccaagtatgacccttccctgaagcccctgtctgtttcctatgatcaagcaacttccctgaggatcctcaacaatggtcatgctttcaacgtggagtttgatgactctcaggacaaagcagtgctcaagggaggacccctggatggcacttacagattgattcagtttcactttcactggggttcacttgatggacaaggttcagagcatactgtggataaaaagaaatatgctgcagaacttcacttggttcactggaacaccaaatatggggattttgggaaagctgtgcagcaacctgatggactggccgttctaggtatttttttgaaggttggcagcgctaaaccgggccttcagaaagttgttgatgtgctggattccattaaaacaaagggcaagagtgctgacttcactaacttcgatcctcgtggcagtcttcctgaatccctggattactggacctacccaggctcactgaccacccctcctcttctggaatgtgtgacctggattgtgctcaaggaacccatcagcgtcagcagcgagcaggtgttgaaattccgtaaacttaacttcaatggggagggtgaacccgaagaactgatggtggacaactggcgcccagctcagccactgaagaacaggcaaatcaaagcttccttcaaa

SEQ ID NO: 5673 - protein, 259 aa, Artificial Sequence
  source: /note="Description of Artificial Sequence: Synthetic Destabilizing Domain (DD)"
SHHWGYGKHNGPEHWHKDFPIAKGERQSPVDIDTHTAKYDPSLKPLSVSYDQATSLRILNNGHAFNVEFDDSQDKIVLKGGPLDGTYRLIQFHFHWGSLDGQGSEHTVDKKKYAAELHLVHWNTKYGDFGKAVQQPDGLAVLGIFLKVGSAKPGLQKVVDVLDSIKTKGKSADFTNFDPRGLLPESLDYWTYPGSLTTPPLLECVTWIVLKEPISVSSEQVLKFRKLNFNGEGEPEELMVDNWRPAQFLKNRQIKASFK

SEQ ID NO: 5674 - DNA, 777 bp, Artificial Sequence
  source: /note="Description of Artificial Sequence: Synthetic Destabilizing Domain (DD)"
tcccatcactgggggtacggcaaacacaacggacctgagcactggcataaggacttccccattgccaagggagagcgccagtcccctgttgacatcgacactcatacagccaagtatgacccttccctgaagcccctgtctgtttcctatgatcaagcaacttccctgaggatcctcaacaatggtcatgctttcaacgtggagtttgatgactctcaggacaaaattgtgctcaagggaggacccctggatggcacttacagattgattcagtttcactttcactggggttcacttgatggacaaggttcagagcatactgtggataaaaagaaatatgctgcagaacttcacttggttcactggaacaccaaatatggggattttgggaaagctgtgcagcaacctgatggactggccgttctaggtatttttttgaaggttggcagcgctaaaccgggccttcagaaagttgttgatgtgctggattccattaaaacaaagggcaagagtgctgacttcactaacttcgatcctcgtggcctccttcctgaatccctggattactggacctacccaggctcactgaccacccctcctcttctggaatgtgtgacctggattgtgctcaaggaacccatcagcgtcagcagcgagcaggtgttgaaatttcgtaaacttaacttcaatggggagggtgaacccgaagaactgatggtggacaactggcgcccagctcagtttctgaagaacaggcaaatcaaagcttccttcaaa

SEQ ID NO: 5675 - protein, 259 aa, Artificial Sequence
  source: /note="Description of Artificial Sequence: Synthetic Destabilizing Domain (DD)"
SHHWGYGKHNGPEHWHKDFPIAKGERQSPVDIDTHTAKYDPSLKPLSVSYDQATSLRILNNGHAFNVEFKDSQDKAVLKGGPLDGTYRLIQFHFHWGSLDGQGSEHTVDKKKYAAELHLVHWNTKYGDFGKAVQQPDGLAVLGIFLKVGSAKPGLQKVVDVLDSIKTKGKSADFTNFDPRGLLPESLDYWTYPGSLTTPPLLECVTWIVLKEPISVSSEQVLKFRKLNFNGEGEPEELMVDNWRPAQHLKNRQIKASFK

SEQ ID NO: 5676 - DNA, 777 bp, Artificial Sequence
  source: /note="Description of Artificial Sequence: Synthetic Destabilizing Domain (DD)"
tcccatcactgggggtacggcaaacacaacggacctgagcactggcataaggacttccccattgccaagggagagcgccagtcccctgttgacatcgacactcatacagccaagtatgacccttccctgaagcccctgtctgtttcctatgatcaagcaacttccctgaggatcctcaacaatggtcatgctttcaacgtggagtttaaggactctcaggacaaagcagtgctcaagggaggacccctggatggcacttacagattgattcagtttcactttcactggggttcacttgatggacaaggttcagagcatactgtggataaaaagaaatatgctgcagaacttcacttggttcactggaacaccaaatatggggattttgggaaagctgtgcagcaacctgatggactggccgttctaggtatttttttgaaggttggcagcgctaaaccgggccttcagaaagttgttgatgtgctggattccattaaaacaaagggcaagagtgctgacttcactaacttcgatcctcgtggcctccttcctgaatccctggattactggacctacccaggctcactgaccacccctcctcttctggaatgtgtgacctggattgtgctcaaggaacccatcagcgtcagcagcgagcaggtgttgaaattccgtaaacttaacttcaatggggagggtgaacccgaagaactgatggtggacaactggcgcccagctcagcatctgaagaacaggcaaatcaaagcttccttcaaa

SEQ ID NO: 5677 - protein, 259 aa, Artificial Sequence
  source: /note="Description of Artificial Sequence: Synthetic Destabilizing Domain (DD)"
SHHWGYGKHNGPEHWHKDFPIAKGERQSPVDIDTHTAKYDPSLKPLSVSYDQATSLRILNNGHAFNVEFDFSQDKAVLKGGPLDGTYRLIQFHFHWGSLDGQGSEHTVDKKKYAAELHLVHWNTKYGDFGKAVQQPDGLAVLGIFLKVGSAKPGLQKVVDVLDSIKTKGKSADFTNFDPRGLLPESLDYWTYPGSLTTPPLLECVTWIVLKEPISVSSEQVLKFRKLNFNGEGEPEELMVDNWRPAQFLKNRQIKASFK

SEQ ID NO: 5678 - DNA, 777 bp, Artificial Sequence
  source: /note="Description of Artificial Sequence: Synthetic Destabilizing Domain (DD)"
tcccatcactgggggtacggcaaacacaacggacctgagcactggcataaggacttccccattgccaagggagagcgccagtcccctgttgacatcgacactcatacagccaagtatgacccttccctgaagcccctgtctgtttcctatgatcaagcaacttccctgaggatcctcaacaatggacatgctttcaacgtggagtttgatttttctcaggacaaagcagtgctcaagggaggacccctggatggcacttacagattgattcagtttcactttcactggggttcacttgatggacaaggttcagagcatactgtggataaaaagaaatatgctgcagaacttcacttggttcactggaacaccaaatatggggattttgggaaagctgtgcagcaacctgatggactggccgttctaggtatttttttgaaggttggcagcgctaaaccgggccttcagaaagttgttgatgtgctggattccattaaaacaaagggcaagagtgctgacttcactaacttcgatcctcgtggcctccttcctgaatccctggattactggacctacccaggctcactgaccacccctcctcttctggaatgtgtgacctggattgtgctcaaggaacccatcagcgtcagcagcgagcaggtgttgaaattccgtaaacttaacttcaatggggagggtgaacccgaagaactgatggtggacaactggcgcccagctcagtttctgaagaacaggcaaatcaaagcttccttcaaa

SEQ ID NO: 5679 - DNA, 777 bp, Artificial Sequence
  source: /note="Description of Artificial Sequence: Synthetic Destabilizing Domain (DD)"
tcccatcactgggggtacggcaaacacaacggacctgagcactggcataaggacttccccattgccaagggagagcgccagtcccctgttgacatcgacactcatacagccaagtatgacccttccctgaagcccctgtctgtttcctatgatcaagcaacttccctgaggatcctcaacaatggtcatgctttcaacgtggagtttgatttttctcaggacaaagcagtgctcaagggaggacccctggatggcacttacagattgattcagtttcactttcactggggttcacttgatggacaaggttcagagcatactgtggataaaaagaaatatgctgcagaacttcacttggttcactggaacaccaaatatggggattttgggaaagctgtgcagcaacctgatggactggccgttctaggtatttttttgaaggttggcagcgctaaaccgggccttcagaaagttgttgatgtgctggattccattaaaacaaagggcaagagtgctgacttcactaacttcgatcctcgtggcctccttcctgaatccctggattactggacctacccaggctcactgaccacccctcctcttctggaatgtgtgacctggattgtgctcaaggaacccatcagcgtcagcagcgagcaggtgttgaaattccgtaaacttaacttcaatggggagggtgaacccgaagaactgatggtggacaactggcgcccagctcagtttctgaagaacaggcaaatcaaagcttccttcaaa

SEQ ID NO: 5680 - protein, 259 aa, Artificial Sequence
  source: /note="Description of Artificial Sequence: Synthetic Destabilizing Domain (DD)"
SHHWGYGKHNGPEHWHKDFPIAKGERQSPVDIDTHTAKYDPSLKPLSVSYDNATSLRILYNGHAFNVEFDDSQDKAVLKGGPLDGTYRLIQFHFHWGSLDGQGSEHTVDKKKYAAELHLVHWNTKYGDFGKAVQQPDGLAVLGIFLKVGSAKPGLQKVVDVLDSIKTKGKSADFTNFDPRGLLPESLDYWTYPGSLTTPPLLECVTWIVLKEPISVSSEQVLKFRKLNFNGEGEPEELMVDNWRPAQPLKNRQIKASFK

SEQ ID NO: 5681 - DNA, 777 bp, Artificial Sequence
  source: /note="Description of Artificial Sequence: Synthetic Destabilizing Domain (DD)"
tcccatcactgggggtacggcaaacacaacggacctgagcactggcataaggacttccccattgccaagggagagcgccagtcccctgttgacatcgacactcatacagccaagtatgacccttccctgaagcccctgtctgtttcctatgataatgcaacttccctgaggatcctctataatggtcatgctttcaacgtggagtttgatgactctcaggacaaagcagtgctcaagggaggacccctggatggcacttacagattgattcagtttcactttcactggggttcacttgatggacaaggttcagagcatactgtggataaaaagaaatatgctgcagaacttcacttggttcactggaacaccaaatatggggattttgggaaagctgtgcagcaacctgatggactggccgttctaggtatttttttgaaggttggcagcgctaaaccgggccttcagaaagttgttgatgtgctggattccattaaaacaaagggcaagagtgctgacttcactaacttcgatcctcgtggcctccttcctgaatccctggattactggacctacccaggctcactgaccacccctcctcttctggaatgtgtgacctggattgtgctcaaggaacccatcagcgtcagcagcgagcaggtgttgaaattccgtaaacttaacttcaatggggagggtgaacccgaagaactgatggtggacaactggcgcccagctcagccactgaagaacaggcaaatcaaagcttccttcaaa

SEQ ID NO: 5682 - protein, 259 aa, Artificial Sequence
  source: /note="Description of Artificial Sequence: Synthetic Destabilizing Domain (DD)"
SHHWGYGKHNGPEHWHKDFPIAKGERQSPVDIDTHTAKYDPSLKPLSVSYDQATSLRILNNGHAFNVEFDDSQDKAVLKGGPLDGTYRLIQFHFHWGSLDGQGSDHTVDKKKYAAELHLVHWNTKYGDFGKAVQQPDGLAVLGIFLKVGSAKPGLQKVVDVLDSIKTKGKSADFTNFDPRGLLPESLDYWTYPGSLTTPPLLESVTWIVLKEPISVSSEQVLKFRKLNFNGEGEPEELMVDNWRPAQPLKNRQIKASFK

SEQ ID NO: 5683 - DNA, 777 bp, Artificial Sequence
  source: /note="Description of Artificial Sequence: Synthetic Destabilizing Domain (DD)"
tcccatcactgggggtacggcaaacacaacggacctgagcactggcataaggacttccccattgccaagggagagcgccagtcccctgttgacatcgacactcatacagccaagtatgacccttccctgaagcccctgtctgtttcctatgatcaagcaacttccctgagaatcctcaacaatggtcatgctttcaacgtggagtttgatgactctcaggacaaagcagtgctcaagggaggacccctggatggcacttacagattgattcagtttcactttcactggggttcacttgatggacaaggttcagaccatactgtggataaaaagaaatatgctgcagaacttcacttggttcactggaacaccaaatatggggattttgggaaagctgtgcagcaacctgatggactggccgttctaggtatttttttgaaggttggcagcgctaaaccgggccttcagaaagttgttgatgtgctggattccattaaaacaaagggcaagagtgctgacttcactaacttcgatcctcgtggcctccttcctgaatccctggattactggacctacccaggctcactgaccacccctcctcttctggaatctgtgacctggattgtgctcaaggaacccatcagcgtcagcagcgagcaggtgttgaaattccgtaaacttaacttcaatggggagggtgaacccgaagaactgatggtggacaactggcgcccagctcagccactgaagaacaggcaaatcaaagcttccttcaaa

SEQ ID NO: 5684 - protein, 259 aa, Artificial Sequence
  source: /note="Description of Artificial Sequence: Synthetic Destabilizing Domain (DD)"
SHHWGYGKHNGPEHWHKDFPIAKGERQSPVDIDTHTAKYDPSLKPLSVSYDQATSLRILNNGHAFNVEFDDSQDKAVLKGGPLDGTYRLIQFHFHWGSLDGQGSEHTVDKKKYAAELHLVHWNTKYGDFGKAVQQPDGLAVLGIFLKVGSAKPGLQKVVDVLDSIKTKGKSADFTNFDPRGLLPESLDYWTYPGSLTTPPLLESVTSIVLKEPISVSSEQVLKFRKLNFNGEGEPEELMVDNWRPAQPLKNRQIKASFK

SEQ ID NO: 5685 - DNA, 777 bp, Artificial Sequence
  source: /note="Description of Artificial Sequence: Synthetic Destabilizing Domain (DD)"
tcccatcactgggggtacggcaaacacaacggacctgagcactggcataaggacttccccattgccaagggagagcgccagtcccctgttgacatcgacactcatacagccaagtatgacccttccctgaagcccctgtctgtttcctatgatcaagcaacttccctgagaatcctcaacaatggtcatgctttcaacgtggagtttgatgactctcaggacaaagcagtgctcaagggaggacccctggatggcacttacagattgattcagtttcactttcactggggttcacttgatggacaaggttcagagcatactgtggataaaaagaaatatgctgcagaacttcacttggttcactggaacaccaaatatggggattttgggaaagctgtgcagcaacctgatggactggccgttctaggtatttttttgaaggttggcagcgctaaaccgggccttcagaaagttgttgatgtgctggattccattaaaacaaagggcaagagtgctgacttcactaacttcgatcctcgtggcctccttcctgaatccctggattactggacctacccaggctcactgaccacccctcctcttctggaatctgtgaccagcattgtgctcaaggaacccatcagcgtcagcagcgagcaggtgttgaaattccgtaaacttaacttcaatggggagggtgaacccgaagaactgatggtggacaactggcgcccagctcagccactgaagaacaggcaaatcaaagcttccttcaaa

SEQ ID NO: 5686 - protein, 259 aa, Artificial Sequence
  source: /note="Description of Artificial Sequence: Synthetic Destabilizing Domain (DD)"
SHHWGYGKHNGPEHWHKDFPIAKGERQSPVDIDTHTAKYDPSLKPLSVSYDQATSLRILNNGHAFNVEFDDSQDKAVLKGGPLDGTYRLIQFHFHWGSLDGQGSEHTVDKKKYAAELHLVHWNTKYGDFGKAVQQPDGLAVLGIFLKVGSAKPGLQKVVDVLDSIKTKGKSADFTNFDPRGLLPESLDYWTYPGSLTTPPLLESVTWIVLKEPISVSSEQVLKFRKLNFNGEGEPEELMVDNWRPAQPLKNRQIKASFK

SEQ ID NO: 5687 - DNA, 777 bp, Artificial Sequence
  source: /note="Description of Artificial Sequence: Synthetic Destabilizing Domain (DD)"
tcccatcactgggggtacggcaaacacaacggacctgagcactggcataaggacttccccattgccaagggagagcgccagtcccctgttgacatcgacactcatacagccaagtatgacccttccctgaagcccctgtctgtttcctatgatcaagcaacttccctgagaatcctcaacaatggtcatgctttcaacgtggagtttgatgactctcaggacaaagcagtgctcaagggaggacccctggatggcacttacagattgattcagtttcactttcactggggttcacttgatggacaaggttcagagcatactgtggataaaaagaaatatgctgcagaacttcacttggttcactggaacaccaaatatggggattttgggaaagctgtgcagcaacctgatggactggccgttctaggtatttttttgaaggttggcagcgctaaaccgggccttcagaaagttgttgatgtgctggattccattaaaacaaagggcaagagtgctgacttcactaacttcgatcctcgtggcctccttcctgaatccctggattactggacctacccaggctcactgaccacccctcctcttctggaatctgtgacctggattgtgctcaaggaacccatcagcgtcagcagcgagcaggtgttgaaattccgtaaacttaacttcaatggggagggtgaacccgaagaactgatggtggacaactggcgcccagctcagccactgaagaacaggcaaatcaaagcttccttcaaa

SEQ ID NO: 5688 - protein, 259 aa, Artificial Sequence
  source: /note="Description of Artificial Sequence: Synthetic Destabilizing Domain (DD)"
SHHWGYGKHNGPEHWHKDFPIAKGERQSPVDIDTHTAKYDPSLKPLSVSYDQATSLRILNNGHAFNVEFDDSQDKAVLKGGPLDGTYRLIQFHFHWGSLDGQGSEHTVDKKKYAAELHLVHWNTKYGDFGKAVQQPDGLAVLGIFLKVGSAKPGLQKVVDVLDSIKTKGKSADFTNFDPRGLLPESLDYWTIPGSLTTPPLLECVTWIVLKEPISVSSEQVLKFRKLNFNGEGEPEELMVDNWRPAQPLKNRQIKASFK

SEQ ID NO: 5689 - DNA, 777 bp, Artificial Sequence
  source: /note="Description of Artificial Sequence: Synthetic Destabilizing Domain (DD)"
tcccatcactgggggtacggcaaacacaacggacctgagcactggcataaggacttccccattgccaagggagagcgccagtcccctgttgacatcgacactcatacagccaagtatgacccttccctgaagcccctgtctgtttcctatgatcaagcaacttccctgaggatcctcaacaatggtcatgctttcaacgtggagtttgatgactctcaggacaaagcagtgctcaagggaggacccctggatggcacttacagattgattcagtttcactttcactggggttcacttgatggacaaggttcagagcatactgtggataaaaagaaatatgctgcagaacttcacttggttcactggaacaccaaatatggggattttgggaaagctgtgcagcaacctgatggactggccgttctaggtatttttttgaaggttggcagcgctaaaccgggccttcagaaagttgttgatgtgctggattccattaaaacaaagggcaagagtgctgacttcactaacttcgatcctcgtggcctccttcctgaatccctggattactggaccattccaggctcactgaccacccctcctcttctggaatgtgtgacctggattgtgctcaaggaacccatcagcgtcagcagcgagcaggtgttgaaattccgtaaacttaacttcaatggggagggtgaacccgaagaactgatggtggacaactggcgcccagctcagccactgaagaacaggcaaatcaaagcttccttcaaa

SEQ ID NO: 5690 - DNA, 777 bp, Artificial Sequence
  source: /note="Description of Artificial Sequence: Synthetic Destabilizing Domain (DD)"
tcccatcactgggggtacggcaaacacaacggacctgagcactggcataaggacttccccattgccaagggagagcgccagtcccctgttgacatcgacactcatacagccaagtatgacccttccctgaagcccctgtctgtttcctatgatcaagcaacttccctgaggatcctcaacaatggtcatgctttcaacgtggagtttgatgactctcaggacaaagcagtgctcaagggaggacccctggatggcacttacagattgattcagtttcactttcactggggttcacttgatggacaaggttcagagcatactgtggataaaaagaaatatgctgcagaacttcacttggttcactggaacaccaaatatggggattttgggaaagctgtgcagcaacctgatggactggccgttctaggtatttttttgaaggttggcagcgctaaaccgggccttcagaaagttgttgatgtgctggattccattaaaacaaagggcaagagtgctgacttcactaatttcgatcctcgtggcctccttcctgaatccctggattactggaccattccaggctcactgaccacccctcctcttctggaatgtgtgacctggattgtgctcaaggaacccatcagcgtcagcagcgagcaggtgttgaaattccgtaaacttaacttcaatggggagggtgaacccgaagaactgatggtggacaactggcgcccagctcagccactgaagaacaggcaaatcaaagcttccttcaaa

SEQ ID NO: 5691 - protein, 259 aa, Artificial Sequence
  source: /note="Description of Artificial Sequence: Synthetic Destabilizing Domain (DD)"
SHHWGYGKHNGPEHWHKDFPIAKGERQSPVDIDTHTAKYDPSLKPLSVSYDQATSLRILNNGHAFNVEFDDNQDKAVLKGGPLDGTYYLIQFHFHWGSLDGQGSEHTVDKKKYAAELHLVHWNTKYGDFGKAVQQPDGLAVLGIFLKVGSAKPGLQKVVDVLDSIKTKGKSADFTNFDPRGLLPESLDYWTYPGSLTTPPLLECVTWIVLKEPISVSSEQVLKFRKLNFNGEGEPEELMVDNWRPAQPLKNRQIKASFK

SEQ ID NO: 5692 - DNA, 777 bp, Artificial Sequence
  source: /note="Description of Artificial Sequence: Synthetic Destabilizing Domain (DD)"
tcccatcactgggggtacggcaaacacaacggacctgagcactggcataaggacttccccattgccaagggagagcgccagtcccctgttgacatcgacactcatacagccaagtatgacccttccctgaagcccctgtctgtttcctatgatcaagcaacttccctgaggatcctcaacaatggtcatgctttcaacgtggagtttgatgacaatcaggacaaagcagtgctcaagggaggacccctggatggcacttactatttgattcagtttcactttcactggggttcacttgatggacaaggttcagagcatactgtggataaaaagaaatatgctgcagaacttcacttggttcactggaacaccaaatatggggattttgggaaagctgtgcagcaacctgatggactggccgttctaggtatttttttgaaggttggcagcgctaaaccgggccttcagaaagttgttgatgtgctggattccattaaaacaaagggcaagagtgctgacttcactaacttcgatcctcgtggcctccttcctgaatccctggattactggacctacccaggctcactgaccacccctcctcttctggaatgtgtgacctggattgtgctcaaggaacccatcagcgtcagcagcgagcaggtgttgaaattccgtaaacttaacttcaatggggagggtgaacccgaagaactgatggtggacaactggcgcccagctcagccactgaagaacaggcaaatcaaagcttccttcaaa

SEQ ID NO: 5693 - protein, 259 aa, Artificial Sequence
  source: /note="Description of Artificial Sequence: Synthetic Destabilizing Domain (DD)"
SHHWGYGKHNGPEHWHKDFPIAKGERQSPVDIDTHTAKYDPSLKPLSVSYDQATSLRILNNGHAFNVEFKDSQDKAVLKGGPLDGTYRLIQFHFHWGSLDGQGSEHTVDKKKYAAELHLVHWNTKYGDFGKAVQQPDGLAVLGIFLKVGSAKPGLQKVVDVLDSIKTKGKSADFTNFDPRGLLPESLDYWFYPGSLTTPPLLECVTWIVLKEPISVSSEQVLKFRKLNFNGEGEPEELMVDNWRPAQPLKNRQIKASFK

SEQ ID NO: 5694 - DNA, 777 bp, Artificial Sequence
  source: /note="Description of Artificial Sequence: Synthetic Destabilizing Domain (DD)"
tcccatcactgggggtacggcaaacacaacggacctgagcactggcataaggacttccccattgccaagggagagcgccagtcccctgttgacatcgacactcatacagccaagtatgacccttccctgaagcccctgtctgtttcctatgatcaagcaacttccctgaggatcctcaacaatggtcatgctttcaacgtggagtttaaggactctcaggacaaagcagtgctcaagggaggacccctggatggcacttacagattgattcagtttcactttcactggggttcacttgatggacaaggttcagagcatactgtggataaaaagaaatatgctgcagaacttcacttggttcactggaacaccaaatatggggattttgggaaagctgtgcagcaacctgatggactggccgttctaggtatttttttgaaggttggcagcgctaaaccgggccttcagaaagttgttgatgtgctggattccattaaaacaaagggcaagagtgctgacttcactaacttcgatcctcgtggcctccttcctgaatccctggattactggttttacccaggctcactgaccacccctcctcttctggaatgtgtgacctggattgtgctcaaggaacccatcagcgtcagcagcgagcaggtgttgaaattccgtaaacttaacttcaatggggagggtgaacccgaagaactgatggtggacaactggcgcccagctcagccactgaagaacaggcaaatcaaagcttccttcaaa

SEQ ID NO: 5695 - protein, 236 aa, Artificial Sequence
  source: /note="Description of Artificial Sequence: Synthetic Destabilizing Domain (DD)"
SHHWGYGKHNGPEHWHKDFPIAKGERQSPVDIDTHTAKYDPSLKPLSVSYDQATSLRILNNGHAFNVEFDDSQDKAVLKGGPLDGTYRLIQFHFHWGSLDGQGSEHTVDKKKYAAELHLVHWNTKYGDFGKAVQQPDGLAVLGIFLKVGSAKPGLQKVVDVLDSIKTKGKSADFTNFDPRGLLPESLDYWTYPGSLTTPPLLECVTWIVLKEPISVSSEQVLKFRKLNFNGEGEPE

SEQ ID NO: 5696 - DNA, 777 bp, Artificial Sequence
  source: /note="Description of Artificial Sequence: Synthetic Destabilizing Domain (DD)"
tcccatcactgggggtacggcaaacacaacggacctgagcactggcataaggacttccccattgccaagggagagcgccagtcccctgttgacatcgacactcatacagccaagtatgacccttccctgaagcccctgtctgtttcctatgatcaagcaacttccctgaggatcctcaacaatggtcatgctttcaacgtggagtttgatgactctcaggacaaagcagtgctcaagggaggacccctggatggcacttacagattgattcagtttcactttcactggggttcacttgatggacaaggttcagagcatactgtggataaaaagaaatatgctgcagaacttcacttggttcactggaacaccaaatatggggattttgggaaagctgtgcagcaacctgatggactggccgttctaggtatttttttgaaggttggcagcgctaaaccgggccttcagaaagttgttgatgtgctggattccattaaaacaaagggcaagagtgctgacttcactaacttcgatcctcgtggcctccttcctgaatccctggattactggacctacccaggctcactgaccacccctcctcttctggaatgtgtgacctggattgtgctcaaggaacccatcagcgtcagcagcgagcaggtgttgaaattccgtaaacttaacttcaatggggagggtgaacccgaataactgatggtggacaactggcgcccagctcagccactgaagaacaggcaaatcaaagcttccttcaaa

SEQ ID NO: 5697 - protein, 259 aa, Artificial Sequence
  source: /note="Description of Artificial Sequence: Synthetic Destabilizing Domain (DD)"
SHHWGYGKHNGPEHWHKDFPIAKGERQSPVDIDTHTAKYDPSLKPLSVSYDQATSLRILNNGHAFNVEFDDSQDKAVLKGGPLDGTYRLIQFHFHWGSLDGQGSEHTVDKKKYAAELHLVHWNTKYGDFGKAVQQPDGLAVLDIFLKVGSAKPGLQKVVDVLDSIKTKGKSADFTNFDPRGLLPESLDYWTYPGSLTTPPLLECVTWIVLKEPISVSSEQVLKFRKLNFNGEGEPEELMVDNWRPAQPLKNRQIKASFK

SEQ ID NO: 5698 - DNA, 777 bp, Artificial Sequence
  source: /note="Description of Artificial Sequence: Synthetic Destabilizing Domain (DD)"
tcccatcactgggggtacggcaaacacaacggacctgagcactggcataaggacttccccattgccaagggagagcgccagtcccctgttgacatcgacactcatacagccaagtatgacccttccctgaagcccctgtctgtttcctatgatcaagcaacttccctgaggatcctcaacaatggtcatgctttcaacgtggagtttgatgactctcaggacaaagcagtgctcaagggaggacccctggatggcacttacagattgattcagtttcactttcactggggttcacttgatggacaaggttcagagcatactgtggataaaaagaaatatgctgcagaacttcacttggttcactggaacaccaaatatggggattttgggaaagctgtgcagcaacctgatggactggccgttctagatatttttttgaaggttggcagcgctaaaccgggccttcagaaagttgttgatgtgctggattccattaaaacaaagggcaagagtgctgacttcactaacttcgatcctcgtggcctccttcctgaatccctggattactggacctacccaggctcactgaccacccctcctcttctggaatgtgtgacctggattgtgctcaaggaacccatcagcgtcagcagcgagcaggtgttgaaattccgtaaacttaacttcaatggggagggtgaacccgaagaactgatggtggacaactggcgcccagctcagccactgaagaacaggcaaatcaaagcttccttcaaa

SEQ ID NO: 5699 - protein, 259 aa, Artificial Sequence
  source: /note="Description of Artificial Sequence: Synthetic Destabilizing Domain (DD)"
SHHWGYGKHNGPEHWHKDFPIAKGERQSPVDIDTHTAKYDPSLKPLSVSYDQATSLRILNNGHAFNVEFDDSQDKAVLKGGPLDGTYRLIQFHFHWGSLDGQGSEHTVDKKKYAAELHLVHWNTKYGDFGKAVQQPDGLAVLGIFLKVGSAKPGLQKVVDVLDSIKTKGKSADFTNFDPRGLLPESLDYWTLPGSLTTPPLLECVTWIVLKEPISVSSEQVLKFRKLNFNGEGEPEELMVDNWRPAQPLKNRQIKASFL

SEQ ID NO: 5700 - DNA, 777 bp, Artificial Sequence
  source: /note="Description of Artificial Sequence: Synthetic Destabilizing Domain (DD)"
tcccatcactgggggtacggcaaacacaacggacctgagcactggcataaggacttccccattgccaagggagagcgccagtcccctgttgacatcgacactcatacagccaagtatgacccttccctgaagcccctgtctgtttcctatgatcaagcaacttccctgaggatcctcaacaatggtcatgctttcaacgtggagtttgatgactctcaggacaaagcagtgctcaagggaggacccctggatggcacttacagattgattcagtttcactttcactggggttcacttgatggacaaggttcagagcatactgtggataaaaagaaatatgctgcagaacttcacttggttcactggaacaccaaatatggggattttgggaaagctgtgcagcaacctgatggactggccgttctaggtatttttttgaaggttggcagcgctaaaccgggccttcagaaagttgttgatgtgctggattccattaaaacaaagggcaagagtgctgacttcactaacttcgatcctcgtggcctccttcctgaatccctggattactggaccttgccaggctcactgaccacccctcctcttctggaatgtgtgacctggattgtgctcaaggaacccatcagcgtcagcagcgagcaggtgttgaaattccgtaaacttaacttcaatggggagggtgaacccgaagaactgatggtggacaactggcgcccagctcagccactgaagaacaggcaaatcaaagcttccttcttg

SEQ ID NO: 5701 - protein, 259 aa, Artificial Sequence
  source: /note="Description of Artificial Sequence: Synthetic Destabilizing Domain (DD)"
SHHWGYGKHNGPEHWHKDFPIAKGERQSPVDIDTHTAKYDPSLKPLSVSYDQATSLRILNNGHAFNVEFDDSQDKAVLKGGPLDGTYRLIQFHFHWGSLDGQGSEHTVDKKKYAAELHLVHWNTKYGDFGKAVQQPDGLAVLGIFLKVGSAKPGLQKVVDVLDSIKTKGKSADFTNFDPRGLLPESLDYWTYPGSLTTPPLLECMTWIVLKEPISVSSEQVLKFRKLNFNGEGEPEELMVDNWRPAQPLKNRQIKASFK

SEQ ID NO: 5702 - DNA, 777 bp, Artificial Sequence
  source: /note="Description of Artificial Sequence: Synthetic Destabilizing Domain (DD)"
tcccatcactgggggtacggcaaacacaacggacctgagcactggcataaggacttccccattgccaagggagagcgccagtcccctgttgacatcgacactcatacagccaagtatgacccttccctgaagcccctgtctgtttcctatgatcaagcaacttccctgaggatcctcaacaatggtcatgctttcaacgtggagtttgatgactctcaggacaaagcagtgctcaagggaggacccctggatggcacttacagattgattcagtttcactttcactggggttcacttgatggacaaggttcagagcatactgtggataaaaagaaatatgctgcagaacttcacttggttcactggaacaccaaatatggggattttgggaaagctgtgcagcaacctgatggactggccgttctaggtatttttttgaaggttggcagcgctaaaccgggccttcagaaagttgttgatgtgctggattccattaaaacaaagggcaagagtgctgacttcactaacttcgatcctcgtggcctccttcctgaatccctggattactggacctacccaggctcactgaccacccctcctcttctggaatgtatgacctggattgtgctcaaggaacccatcagcgtcagcagcgagcaggtgttgaaattccgtaaacttaacttcaatggggagggtgaacccgaagaactgatggtggacaactggcgcccagctcagccactgaagaacaggcaaatcaaagcttccttcaaa

SEQ ID NO: 5703 - protein, 259 aa, Artificial Sequence
  source: /note="Description of Artificial Sequence: Synthetic Destabilizing Domain (DD)"
SHHWGYGKHNGPEHWHKDFPIAKGERQSPVDIDTHTAKYDPSLKPLSVSYDQATSLRILNNGHAFNVEFFDSQDKAVLKGGPLDGTYRLIQFHFHWGSLDGQGSEHTVDKKKYAAELHLVHWNTKYGDFGKAVQQPDGLAVLGIFLKVGSAKPGLQKVVDVLDSIKTKGKSADFTNFDPRGLLPESLDYWTYPGSLTTPPLLECVTWIVLKEPISVSSEQVLKFRKLNFNGEGEPEELMFDNWRPAQLLKNRQIKASFK

SEQ ID NO: 5704 - DNA, 777 bp, Artificial Sequence
  source: /note="Description of Artificial Sequence: Synthetic Destabilizing Domain (DD)"
tcccatcactgggggtacggcaaacacaacggacctgagcactggcataaggacttccccattgccaagggagagcgccagtcccctgttgacatcgacactcatacagccaagtatgacccttccctgaagcccctgtctgtttcctatgatcaagcaacttccctgaggatcctcaacaatggtcatgctttcaacgtggagttttttgactctcaggacaaagcagtgctcaagggaggacccctggatggcacttacagattgattcagtttcactttcactggggttcacttgatggacaaggttcagagcatactgtggataaaaagaaatatgctgcagaacttcacttggttcactggaacaccaaatatggggattttgggaaagctgtgcagcaacctgatggactggccgttctaggtatttttttgaaggttggcagcgctaaaccgggccttcagaaagttgttgatgtgctggattccattaaaacaaagggcaagagtgctgacttcactaacttcgatcctcgtggcctccttcctgaatccctggattactggacctacccaggctcactgaccacccctcctcttctggaatgtgtgacctggattgtgctcaaggaacccatcagcgtcagcagcgagcaggtgttgaaattccgtaaacttaacttcaatggggagggtgaacccgaagaactgatgtttgacaactggcgcccagctcagttgctgaagaacaggcaaatcaaagcttccttcaaa

SEQ ID NO: 5705 - protein, 259 aa, Artificial Sequence
  source: /note="Description of Artificial Sequence: Synthetic Destabilizing Domain (DD)"
SHHWGYGKHNGPEHWHKDFPIAKGERQSPVDIDTHTAKYDPSLKPLSVSYDQATSLRILNNGHAFNVEFDDSQDKAVLKGGPLDGTYRLIQFHFHWGSLDGQGSEHTVDKKKYAAELHLVHWNTKYGDFGKAVQQPDGLAVLGIFLKVGSAKPGLQKVVDVLDSIKTKGKSADFTNFDPRGLLPESLDYWTFPGSLTTPPLLECVTWIVLKEPISVSSEQVLKFRKLNFNGEGEPEELMVDNWRPAQPLKNRQIKASFK

SEQ ID NO: 5706 - DNA, 777 bp, Artificial Sequence
  source: /note="Description of Artificial Sequence: Synthetic Destabilizing Domain (DD)"
tcccatcactgggggtacggcaaacacaacggacctgagcactggcataaggacttccccattgccaagggagagcgccagtcccctgttgacatcgacactcatacagccaagtatgacccttccctgaagcccctgtctgtttcctatgatcaagcaacttccctgaggatcctcaacaatggtcatgctttcaacgtggagtttgatgactctcaggacaaagcagtgctcaagggaggacccctggatggcacttacagattgattcagtttcactttcactggggttcacttgatggacaaggttcagagcatactgtggataaaaagaaatatgctgcagaacttcacttggttcactggaacaccaaatatggggattttgggaaagctgtgcagcaacctgatggactggccgttctaggtatttttttgaaggttggcagcgctaaaccgggccttcagaaagttgttgatgtgctggattccattaaaacaaagggcaagagtgctgacttcactaacttcgatcctcgtggcctccttcctgaatccctggattactggacctttccaggctcactgaccacccctcctcttctggaatgtgtgacctggattgtgctcaaggaacccatcagcgtcagcagcgagcaggtgttgaaattccgtaaacttaacttcaatggggagggtgaacccgaagaactgatggtggacaactggcgcccagctcagccactgaagaacaggcaaatcaaagcttccttcaaa

SEQ ID NO: 5707 - protein, 259 aa, Artificial Sequence
  source: /note="Description of Artificial Sequence: Synthetic Destabilizing Domain (DD)"
SHHWGYGKHNGPEHWHKDFPIAKGERQSPVDIDTHTAKYDPSLKPLSVSYDQATSLRILNNGHAFNVEFDDSQDKAVLKGGPLDGTYRLIQFHFHWGSLDGQGSEHTVDKKKYAAELHLVHWNTKYGDFGKAVQQPDGLAVLGIFFKVGSAKPGLQKVVDVLDSIKTKGKSADFTNFDPRGLLPESLDYWTYPGSLTTPPLLECVTWIVLKEPISVSSEQVLKFRKLNFNGEGEPEELMVDNWRPAFPLKNRQIKASFK

SEQ ID NO: 5708 - DNA, 777 bp, Artificial Sequence
  source: /note="Description of Artificial Sequence: Synthetic Destabilizing Domain (DD)"
tcccatcactgggggtacggcaaacacaacggacctgagcactggcataaggacttccccattgccaagggagagcgccagtcccctgttgacatcgacactcatacagccaagtatgacccttccctgaagcccctgtctgtttcctatgatcaagcaacttccctgaggatcctcaacaatggtcatgctttcaacgtggagtttgatgactctcaggacaaagcagtgctcaagggaggacccctggatggcacttacagattgattcagtttcactttcactggggttcacttgatggacaaggttcagagcatactgtggataaaaagaaatatgctgcagaacttcacttggttcactggaacaccaaatatggggattttgggaaagctgtgcagcaacctgatggactggccgttctaggtattttttttaaggttggcagcgctaaaccgggccttcagaaagttgttgatgtgctggattccattaaaacaaagggcaagagtgctgacttcactaacttcgatcctcgtggcctccttcctgaatccctggattactggacctacccaggctcactgaccacccctcctcttctggaatgtgtgacctggattgtgctcaaggaacccatcagcgtcagcagcgagcaggtgttgaaattccgtaaacttaacttcaatggggagggtgaacccgaagaactgatggtggacaactggcgcccagcttttccactgaagaacaggcaaatcaaagcttccttcaaa

SEQ ID NO: 5709 - protein, 259 aa, Artificial Sequence
  source: /note="Description of Artificial Sequence: Synthetic Destabilizing Domain (DD)"
SHHWGYGKHNGPEHWHKDFPIAKGERQSPVDIDTHTAKYDPSLKPLSVSYIQATSLRILNNGHAFNVEFDDSQDKAVLKGGPLDGTYRLIQFHFHWGSLDGQGSEHTVDKKKYAAELHLVHWNTKYGDFGKAVQQPDGLAVLGIFLKVGSAKPGLQKVVDVLDSIKTKGKSADFTNFDPRGLLPESLDYWTYPGSLTTPPLLECVTWIVLKEPISVSSEQVLKFRKLNFNGEGEPEELMVDNWRPAQPLKNRQIKAPFK

SEQ ID NO: 5710 - DNA, 777 bp, Artificial Sequence
  source: /note="Description of Artificial Sequence: Synthetic Destabilizing Domain (DD)"
tcccatcactgggggtacggcaaacacaacggacctgagcactggcataaggacttccccattgccaagggagagcgccagtcccctgttgacatcgacactcatacagccaagtatgacccttccctgaagcccctgtctgtttcctatattcaagcaacttccctgaggatcctcaacaatggtcatgctttcaacgtggagtttgatgactctcaggacaaagcagtgctcaagggaggacccctggatggcacttacagattgattcagtttcactttcactggggttcacttgatggacaaggttcagagcatactgtggataaaaagaaatatgctgcagaacttcacttggttcactggaacaccaaatatggggattttgggaaagctgtgcagcaacctgatggactggccgttctaggtatttttttgaaggttggcagcgctaaaccgggccttcagaaagttgttgatgtgctggattccattaaaacaaagggcaagagtgctgacttcactaacttcgatcctcgtggcctccttcctgaatccctggattactggacctacccaggctcactgaccacccctcctcttctggaatgtgtgacctggattgtgctcaaggaacccatcagcgtcagcagcgagcaggtgttgaaattccgtaaacttaacttcaatggggagggtgaacccgaagaactgatggtggacaactggcgcccagctcagccactgaagaacaggcaaatcaaagctcccttcaaa

SEQ ID NO: 5711 - protein, 259 aa, Artificial Sequence
  source: /note="Description of Artificial Sequence: Synthetic Destabilizing Domain (DD)"
SHHWGYGKHNGPEHWHKDFPIAKGERQSPVDIDTHTAKYDPSLKPLSVSYDQATSLRILNNGHAFNVEFDSSQDKAVLKGGPLDGTYRLIQFHFHWGSLDGQGSEHTVDKKKYAAELHLVHWNTKYGDFGKAVQQPDGLAVLGIFLKVGSAKPGLQKVVDVLDSIKTKGKSADFTNFDPRGLLPESLDYWNYPGSLTTPPLLECVTWIVLKEPISVSSEQVLKFRKLNFNGEGEPEELMVDNWRPAQPLKNRQIKASFK

SEQ ID NO: 5712 - DNA, 777 bp, Artificial Sequence
  source: /note="Description of Artificial Sequence: Synthetic Destabilizing Domain (DD)"
tcccatcactgggggtacggcaaacacaacggacctgagcactggcataaggacttccccattgccaagggagagcgccagtcccctgttgacatcgacactcatacagccaagtatgacccttccctgaagcccctgtctgtttcctatgatcaagcaacttccctgaggatcctcaacaatggtcatgctttcaacgtggagtttgatagttctcaggacaaagcagtgctcaagggaggacccctggatggcacttacagattgattcagtttcactttcactggggttcacttgatggacaaggttcagagcatactgtggataaaaagaaatatgctgcagaacttcacttggttcactggaacaccaaatatggggattttgggaaagctgtgcagcaacctgatggactggccgttctaggtatttttttgaaggttggcagcgctaaaccgggccttcagaaagttgttgatgtgctggattccattaaaacaaagggcaagagtgctgacttcactaacttcgatcctcgtggcctccttcctgaatccctggattactggaattacccaggctcactgaccacccctcctcttctggaatgtgtgacctggattgtgctcaaggaacccatcagcgtcagcagcgagcaggtgttgaaattccgtaaacttaacttcaatggggagggtgaacccgaagaactgatggtggacaactggcgcccagctcagccactgaagaacaggcaaatcaaagcttccttcaaa

SEQ ID NO: 5713 - protein, 259 aa, Artificial Sequence
  source: /note="Description of Artificial Sequence: Synthetic Destabilizing Domain (DD)"
SHHWGYGKHNGPEHWHKDFPIAKGERQSPVDIDTHTAKYDPSLKPLSVSYDQATSLRILNNGHAFNVEFDDSQDKAVLKGGPLDGTYRLIQFHFHWGSLDGQGSEHTVDKKKYAAELHLVHWNTKYGDFGKAVQQPDGLAVLGIFLKVGSAKPGLQKVVDVLDSIKTKGKSADFTNFEPRGLLPESLDYWIYPGSLTTPPLLECVTWIVLKEPISVSSEQVLKFRKLNFNGEGEPEELMVDNWRPAQPLKNRQIKASFK

SEQ ID NO: 5714 - DNA, 777 bp, Artificial Sequence
  source: /note="Description of Artificial Sequence: Synthetic Destabilizing Domain (DD)"
tcccatcactgggggtacggcaaacacaacggacctgagcactggcataaggacttccccattgccaagggagagcgccagtcccctgttgacatcgacactcatacagccaagtatgacccttccctgaagcccctgtctgtttcctatgatcaagcaacttccctgaggatcctcaacaatggtcatgctttcaacgtggagtttgatgactctcaggacaaagcagtgctcaagggaggacccctggatggcacttacagattgattcagtttcactttcactggggttcacttgatggacaaggttcagagcatactgtggataaaaagaaatatgctgcagaacttcacttggttcactggaacaccaaatatggggattttgggaaagctgtgcagcaacctgatggactggccgttctaggtatttttttgaaggttggcagcgctaaaccgggccttcagaaagttgttgatgtgctggattccattaaaacaaagggcaagagtgctgacttcactaacttcgagcctcgtggcctccttcctgaatccctggattactggatttacccaggctcactgaccacccctcctcttctggaatgtgtgacctggattgtgctcaaggaacccatcagcgtcagcagcgagcaggtgttgaaattccgtaaacttaacttcaatggggagggtgaacccgaagaactgatggtggacaactggcgcccagctcagccactgaagaacaggcaaatcaaagcttccttcaaa

SEQ ID NO: 5715 - protein, 259 aa, Artificial Sequence
  source: /note="Description of Artificial Sequence: Synthetic Destabilizing Domain (DD)"
SHHWGYGKHNGPEHWHKDFPIAKGERQSPVDIDTHTAKYDPSLKPLSVSYDQATSLRILNNGHAFNVEFDDSQDKAVLKGGPLDGTYRLIQFHFHWGSLDGQGSEHTVDKKKYAAELHLVHWNTKYGDFGKAVQQPDGLAVLGIFLKVGSAKPGLQKVVDVLDSIKTKGKSADFTNFDPRGLLPESLDYWTLPGSLTTPPLLECVTWIVLKEPISVSSEQVLKFRKLNFNGEGEPEELMVDNWRPAQPLKNRQIKASFK

SEQ ID NO: 5716 - DNA, 777 bp, Artificial Sequence
  source: /note="Description of Artificial Sequence: Synthetic Destabilizing Domain (DD)"
tcccatcactgggggtacggcaaacacaacggacctgagcactggcataaggacttccccattgccaagggagagcgccagtcccctgttgacatcgacactcatacagccaagtatgacccttccctgaagcccctgtctgtttcctatgatcaagcaacttccctgaggatcctcaacaatggtcatgctttcaacgtggagtttgatgactctcaggacaaagcagtgctcaagggaggacccctggatggcacttacagattgattcagtttcactttcactggggttcacttgatggacaaggttcagagcatactgtggataaaaagaaatatgctgcagaacttcacttggttcactggaacaccaaatatggggattttgggaaagctgtgcagcaacctgatggactggccgttctaggtatttttttgaaggttggcagcgctaaaccgggccttcagaaagttgttgatgtgctggattccattaaaacaaagggcaagagtgctgacttcactaacttcgatcctcgtggcctccttcctgaatccctggattactggaccttgccaggctcactgaccacccctcctcttctggaatgtgtgacctggattgtgctcaaggaacccatcagcgtcagcagcgagcaggtgttgaaattccgtaaacttaacttcaatggggagggtgaacccgaagaactgatggtggacaactggcgcccagctcagccactgaagaacaggcaaatcaaagcttccttcaaa

SEQ ID NO: 5717 - protein, 259 aa, Artificial Sequence
  source: /note="Description of Artificial Sequence: Synthetic Destabilizing Domain (DD)"
SHHWGYGKHNGPEHWHKDFPIAKGERQSPVDIDTHTAKYDPSLKPLSVSYDQATNLRILNNGHAFNVEFDDSQDKAVLKGGPLDGTYRLIQFHFHWGSLDGKGSEHTVDKKKYAAELHLVHWNTKYGDFGKAVQQPDGLAVLGIFLKVGSAKPGLQKVVDVLDSIKTKGKSADFTNFDPRGLLPESLDYWTYPGSLTTPPLLECVTWIVLKEPISVSSEQVLKFRKLNFNGEGEPEELMVDNWRPAQPLKNRQIKASFK

SEQ ID NO: 5718 - DNA, 777 bp, Artificial Sequence
  source: /note="Description of Artificial Sequence: Synthetic Destabilizing Domain (DD)"
tcccatcactgggggtacggcaaacacaacggacctgagcactggcataaggacttccccattgccaagggagagcgccagtcccctgttgacatcgacactcatacagccaagtatgacccttccctgaagcccctgtctgtttcctatgatcaagcaactaatctgaggatcctcaacaatggtcatgctttcaacgtggagtttgatgactctcaggacaaagcagtgctcaagggaggacccctggatggcacttacagattgattcagtttcactttcactggggttcacttgatggaaagggttcagagcatactgtggataaaaagaaatatgctgcagaacttcacttggttcactggaacaccaaatatggggattttgggaaagctgtgcagcaacctgatggactggccgttctaggtatttttttgaaggttggcagcgctaaaccgggccttcagaaagttgttgatgtgctggattccattaaaacaaagggcaagagtgctgacttcactaacttcgatcctcgtggcctccttcctgaatccctggattactggacctacccaggctcactgaccacccctcctcttctggaatgtgtgacctggattgtgctcaaggaacccatcagcgtcagcagcgagcaggtgttgaaattccgtaaacttaacttcaatggggagggtgaacccgaagaactgatggtggacaactggcgcccagctcagccactgaagaacaggcaaatcaaagcttccttcaaa

SEQ ID NO: 5719 - protein, 259 aa, Artificial Sequence
  source: /note="Description of Artificial Sequence: Synthetic Destabilizing Domain (DD)"
SHHWGYGKHNGPEHWHKDFPIAKGERQSPVDIDTHTAKYDPSLKPLSVSYDQATSLRILNNGHAFNVEFYDSQDKAVLKGGPLDGTYRLIQFHFHWGSLDGQGSEHTVDKKKYAAELHLVHWNTKYGDFGKAVQQPDGLAVLGIFLKVGSAKPGLQKVVDVLDSIKTKGKSADFTNFDPRGLLPESLDYWTYPGSLTTPPLLECVTWIVLKEPISVSSEQVLKFRKLNFNGEGEPEELMVDNWRPALPLKNRQIKASFK

SEQ ID NO: 5720 - DNA, 777 bp, Artificial Sequence
  source: /note="Description of Artificial Sequence: Synthetic Destabilizing Domain (DD)"
tcccatcactgggggtacggcaaacacaacggacctgagcactggcataaggacttccccattgccaagggagagcgccagtcccctgttgacatcgacactcatacagccaagtatgacccttccctgaagcccctgtctgtttcctatgatcaagcaacttccctgaggatcctcaacaatggtcatgctttcaacgtggagttttatgactctcaggacaaagcagtgctcaagggaggacccctggatggcacttacagattgattcagtttcactttcactggggttcacttgatggacaaggttcagagcatactgtggataaaaagaaatatgctgcagaacttcacttggttcactggaacaccaaatatggggattttgggaaagctgtgcagcaacctgatggactggccgttctaggtatttttttgaaggttggcagcgctaaaccgggccttcagaaagttgttgatgtgctggattccattaaaacaaagggcaagagtgctgacttcactaacttcgatcctcgtggcctccttcctgaatccctggattactggacctacccaggctcactgaccacccctcctcttctggaatgtgtgacctggattgtgctcaaggaacccatcagcgtcagcagcgagcaggtgttgaaattccgtaaacttaacttcaatggggagggtgaacccgaagaactgatggtggacaactggcgcccagctcttccactgaagaacaggcaaatcaaagcttccttcaaa

SEQ ID NO: 5721 - protein, 259 aa, Artificial Sequence
  source: /note="Description of Artificial Sequence: Synthetic Destabilizing Domain (DD)"
SHHWGYGKHNGPEHWHKDFPIAKGERQSPVDIDTHTAKYDPSLKPLSVSYDQATSLRILNNGHAFNVEFDDNQDKAVLKGGPLDGTYFLIQFHFHWGSLDGQGSEHTVDKKKYAAELHLVHWNTKYGDFGKAVQQPDGLAVLGIFLKVGSAKPGLQKVVDVLDSIKTKGKSADFTNFDPRGLLPESLDYWTYPGSLTTPPLLECVTWIVLKEPISVSSEQVLKFRKLNFNGEGEPEELMVDNWRPAQPLKNRQIKASFK

SEQ ID NO: 5722 - DNA, 777 bp, Artificial Sequence
  source: /note="Description of Artificial Sequence: Synthetic Destabilizing Domain (DD)"
tcccatcactgggggtacggcaaacacaacggacctgagcactggcataaggacttccccattgccaagggagagcgccagtcccctgttgacatcgacactcatacagccaagtatgacccttccctgaagcccctgtctgtttcctatgatcaagcaacttccctgaggatcctcaacaatggtcatgctttcaacgtggagtttgatgacaatcaggacaaagcagtgctcaagggaggacccctggatggcacttactttttgattcagtttcactttcactggggttcacttgatggacaaggttcagagcatactgtggataaaaagaaatatgctgcagaacttcacttggttcactggaacaccaaatatggggattttgggaaagctgtgcagcaacctgatggactggccgttctaggtatttttttgaaggttggcagcgctaaaccgggccttcagaaagttgttgatgtgctggattccattaaaacaaagggcaagagtgctgacttcactaacttcgatcctcgtggcctccttcctgaatccctggattactggacctacccaggctcactgaccacccctcctcttctggaatgtgtgacctggattgtgctcaaggaacccatcagcgtcagcagcgagcaggtgttgaaattccgtaaacttaacttcaatggggagggtgaacccgaagaactgatggtggacaactggcgcccagctcagccactgaagaacaggcaaatcaaagcttccttcaaa

SEQ ID NO: 5723 - protein, 259 aa, Artificial Sequence
  source: /note="Description of Artificial Sequence: Synthetic Destabilizing Domain (DD)"
SHHWGYGKHNGPEHWHKDFPIAKGERQSPVDIDTHTAKYDPSLKPLSVSYDQATSLRILNNGHAFNVEFKDSQDKAVLKGGPLDGTYRLIQFHFHWGSLDGQGSEHTVDKKKYAAELHLVHWNTKYGDFGKAVQQPDGLAVLGIFLKVGSAKPGLQKVVDVLDSIKTKGKSADFTNFDPRGLLPESLDYWTYPGSLTTPPLLECVTWIVLKEPISVSSEQVLKFRKLNFLGEGGPEEFMVDNWRPAQPLKNRQIKASFK

SEQ ID NO: 5724 - DNA, 777 bp, Artificial Sequence
  source: /note="Description of Artificial Sequence: Synthetic Destabilizing Domain (DD)"
tcccatcactgggggtacggcaaacacaacggacctgagcactggcataaggacttccccattgccaagggagagcgccagtcccctgttgacatcgacactcatacagccaagtatgacccttccctgaagcccctgtctgtttcctatgatcaagcaacttccctgaggatcctcaacaatggtcatgctttcaacgtggagtttaaggactctcaggacaaagcagtgctcaagggaggacccctggatggcacttacagattgattcagtttcactttcactggggttcacttgatggacaaggttcagagcatactgtggataaaaagaaatatgctgcagaacttcacttggttcactggaacaccaaatatggggattttgggaaagctgtgcagcaacctgatggactggccgttctaggtatttttttgaaggttggcagcgctaaaccgggccttcagaaagttgttgatgtgctggattccattaaaacaaagggcaagagtgctgacttcactaacttcgatcctcgtggcctccttcctgaatccctggattactggacctacccaggctcactgaccacccctcctcttctggaatgtgtgacctggattgtgctcaaggaacccatcagcgtcagcagcgagcaggtgttgaaattccgtaaacttaacttccttggggagggtggacccgaagaatttatggtggacaactggcgcccagctcagccactgaagaacaggcaaatcaaagcttccttcaaa

SEQ ID NO: 5725 - protein, 259 aa, Artificial Sequence
  source: /note="Description of Artificial Sequence: Synthetic Destabilizing Domain (DD)"
SHHWGYGKHNGPEHWHKDFPIAKGERQSPVDIDTHTAKYDPSLKPLSVSYDQATSLRILNNGHAFNVEFFDSQDKAVLKGGPLDGTYRLIQFHFHWGSLDGQGSEHTVDKKKYAAELHLVHWNTKYGDFGKAVQQPDGLAVLGIFLKVGSAKPGLQKVVDVLDSIKTKGKSADFTNFDPRGLLPESLDYWTYPGSLTTPPLLECVTWIVLKEPISVSSEQVLKFRKLNFNGEGEPEELMVDNWRPAQPLKNRQIKASFK

SEQ ID NO: 5726 - DNA, 777 bp, Artificial Sequence
  source: /note="Description of Artificial Sequence: Synthetic Destabilizing Domain (DD)"
tcccatcactgggggtacggcaaacacaacggacctgagcactggcataaggacttccccattgccaagggagagcgccagtcccctgttgacatcgacactcatacagccaagtatgacccttccctgaagcccctgtctgtttcctatgatcaagcaacttccctgaggatcctcaacaatggtcatgctttcaacgtggagttttttgactctcaggacaaagcagtgctcaagggaggacccctggatggcacttacagattgattcagtttcactttcactggggttcacttgatggacaaggttcagagcatactgtggataaaaagaaatatgctgcagaacttcacttggttcactggaacaccaaatatggggattttgggaaagctgtgcagcaacctgatggactggccgttctaggtatttttttgaaggttggcagcgctaaaccgggccttcagaaagttgttgatgtgctggattccattaaaacaaagggcaagagtgctgacttcactaacttcgatcctcgtggcctccttcctgaatccctggattactggacctacccaggctcactgaccacccctcctcttctggaatgtgtgacctggattgtgctcaaggaacccatcagcgtcagcagcgagcaggtgttgaaattccgtaaacttaacttcaatggggagggtgaacccgaagaactgatggtggacaactggcgcccagctcagccactgaagaacaggcaaatcaaagcttccttcaaa

SEQ ID NO: 5727 - protein, 259 aa, Artificial Sequence
  source: /note="Description of Artificial Sequence: Synthetic Destabilizing Domain (DD)"
SHHWGYGKHNGPEHWHKDFPIAKGERQSPVDIDTHTAKYDPSLKPLSVSYDQATSLRILNNGHAFNVEFDFSQDKAVLKGGPLDGTYRLIQFHFHWGSLDGQGSEHTVDKKKYAAELHLVHWNTKYGDFGKAVQQPDGLAVLGIFLKVGSAKPGLQKVVDVLDSIKTKGKSADFTNFDPRGLLPESLDYWTYPGSLTTPPLLECVTWIVLKEPISVSSEQVLKFRKLNFNGEGEPEELMVDNWRPAQILKNRQIKASFK

SEQ ID NO: 5728 - DNA, 777 bp, Artificial Sequence
  source: /note="Description of Artificial Sequence: Synthetic Destabilizing Domain (DD)"
tcccatcactgggggtacggcaaacacaacggacctgagcactggcataaggacttccccattgccaagggagagcgccagtcccctgttgacatcgacactcatacagccaagtatgacccttccctgaagcccctgtctgtttcctatgatcaagcaacttccctgaggatcctcaacaatggtcatgctttcaacgtggagtttgatttttctcaggacaaagcagtgctcaagggaggacccctggatggcacttacagattgattcagtttcactttcactggggttcacttgatggacaaggttcagagcatactgtggataaaaagaaatatgctgcagaacttcacttggttcactggaacaccaaatatggggattttgggaaagctgtgcagcaacctgatggactggccgttctaggtatttttttgaaggttggcagcgctaaaccgggccttcagaaagttgttgatgtgctggattccattaaaacaaagggcaagagtgctgacttcactaacttcgatcctcgtggcctccttcctgaatccctggattactggacctacccaggctcactgaccacccctcctcttctggaatgtgtgacctggattgtgctcaaggaacccatcagcgtcagcagcgagcaggtgttgaaattccgtaaacttaacttcaatggggagggtgaacccgaagaactgatggtggacaactggcgcccagctcagattctgaagaacaggcaaatcaaagcttccttcaaa

SEQ ID NO: 5729 - protein, 259 aa, Artificial Sequence
  source: /note="Description of Artificial Sequence: Synthetic Destabilizing Domain (DD)"
SHHWGYGKHNGPEHWHKDFPIAKGERQSPVDIDTHTAKYDPSLKPLSVSYDQATSLRILNNGHAFNVEFDDSQDKAVLKGGPLDGTYRLIQFHFHWGSLDGQGSEHTVDKKKYAAELHLVHWNTKYGDFGKAVQQPDGLAVLGIFLKVGSAKPGLQKVVDVLDSIKTKGKSADFTNFDPRGLLPESLDYWNYPGSLTTPPLLECVTWIVLKEPISVSSEQVLKFRKLNFNGEGEPEELMVDNWRPAQPLKNRQIKASFK

SEQ ID NO: 5730 - DNA, 777 bp, Artificial Sequence
  source: /note="Description of Artificial Sequence: Synthetic Destabilizing Domain (DD)"
tcccatcactgggggtacggcaaacacaacggacctgagcactggcataaggacttccccattgccaagggagagcgccagtcccctgttgacatcgacactcatacagccaagtatgacccttccctgaagcccctgtctgtttcctatgatcaagcaacttccctgaggatcctcaacaatggtcatgctttcaacgtggagtttgatgactctcaggacaaagcagtgctcaagggaggacccctggatggcacttacagattgattcagtttcactttcactggggttcacttgatggacaaggttcagagcatactgtggataaaaagaaatatgctgcagaacttcacttggttcactggaacaccaaatatggggattttgggaaagctgtgcagcaacctgatggactggccgttctaggtatttttttgaaggttggcagcgctaaaccgggccttcagaaagttgttgatgtgctggattccattaaaacaaagggcaagagtgctgacttcactaacttcgatcctcgtggcctccttcctgaatccctggattactggaattacccaggctcactgaccacccctcctcttctggaatgtgtgacctggattgtgctcaaggaacccatcagcgtcagcagcgagcaggtgttgaaattccgtaaacttaacttcaatggggagggtgaacccgaagaactgatggtggacaactggcgcccagctcagccactgaagaacaggcaaatcaaagcttccttcaaa

SEQ ID NO: 5731 - protein, 259 aa, Artificial Sequence
  source: /note="Description of Artificial Sequence: Synthetic Destabilizing Domain (DD)"
  MOD_RES (71)..(71): Any amino acid
  MOD_RES (240)..(240): Any amino acid
  MOD_RES (248)..(248): Any amino acid
SHHWGYGKHNGPEHWHKDFPIAKGERQSPVDIDTHTAKYDPSLKPLSVSYDQATSLRILNNGHAFNVEFDXSQDKAVLKGGPLDGTYRLIQFHFHWGSLDGQGSEHTVDKKKYAAELHLVHWNTKYGDFGKAVQQPDGLAVLGIFLKVGSAKPGLQKVVDVLDSIKTKGKSADFTNFDPRGLLPESLDYWTYPGSLTTPPLLECVTWIVLKEPISVSSEQVLKFRKLNFNGEGEPEELMXDNWRPAQXLKNRQIKASFK

SEQ ID NO: 5732 - DNA, 777 bp, Artificial Sequence
  source: /note="Description of Artificial Sequence: Synthetic Destabilizing Domain (DD)"
tcccatcactgggggtacggcaaacacaacggacctgagcactggcataaggacttccccattgccaagggagagcgccagtcccctgttgacatcgacactcatacagccaagtatgacccttccctgaagcccctgtctgtttcctatgatcaagcaacttccctgaggatcctcaacaatggtcatgctttcaacgtggagtttgatkwytctcaggacaaagcagtgctcaagggaggacccctggatggcacttacagattgattcagtttcactttcactggggttcacttgatggacaaggttcagagcatactgtggataaaaagaaatatgctgcagaacttcacttggttcactggaacaccaaatatggggattttgggaaagctgtgcagcaacctgatggactggccgttctaggtatttttttgaaggttggcagcgctaaaccgggccttcagaaagttgttgatgtgctggattccattaaaacaaagggcaagagtgctgacttcactaacttcgatcctcgtggcctccttcctgaatccctggattactggacctacccaggctcactgaccacccctcctcttctggaatgtgtgacctggattgtgctcaaggaacccatcagcgtcagcagcgagcaggtgttgaaattccgtaaacttaacttcaatggggagggtgaacccgaagaactgatgktkgacaactggcgcccagctcagyyrctgaagaacaggcaaatcaaagcttccttcaaa

SEQ ID NO: 5733 - protein, 259 aa, Artificial Sequence
  source: /note="Description of Artificial Sequence: Synthetic Destabilizing Domain (DD)"
  MOD_RES (53)..(53): Any amino acid
  MOD_RES (55)..(56): Any amino acid
  MOD_RES (191)..(191): Any amino acid
SHHWGYGKHNGPEHWHKDFPIAKGERQSPVDIDTHTAKYDPSLKPLSVSYDQXTXXRILNNGHAFNVEFDDSQDKAVLKGGPLDGTYRLIQFHFHWGSLDGQGSEHTVDKKKYAAELHLVHWNTKYGDFGKAVQQPDGLAVLGIFLKVGSAKPGLQKVVDVLDSIKTKGKSADFTNFDPRGLLPESLDYWXYPGSLTTPPLLECVTWIVLKEPISVSSEQVLKFRKLNFNGEGEPEELMVDNWRPAQPLKNRQIKASFK

SEQ ID NO: 5734 - DNA, 777 bp, Artificial Sequence
  source: /note="Description of Artificial Sequence: Synthetic Destabilizing Domain (DD)"
tcccatcactgggggtacggcaaacacaacggacctgagcactggcataaggacttccccattgccaagggagagcgccagtcccctgttgacatcgacactcatacagccaagtatgacccttccctgaagcccctgtctgtttcctatgatcaagmaacttyyctraggatcctcaacaatggtcatgctttcaacgtggagtttgatgactctcaggacaaagcagtgctcaagggaggacccctggatggcacttacagattgattcagtttcactttcactggggttcacttgatggacaaggttcagagcatactgtggataaaaagaaatatgctgcagaacttcacttggttcactggaacaccaaatatggggattttgggaaagctgtgcagcaacctgatggactggccgttctaggtatttttttgaaggttggcagcgctaaaccgggccttcagaaagttgttgatgtgctggattccattaaaacaaagggcaagagtgctgacttcactaacttcgatcctcgtggcctccttcctgaatccctggattactggwyytacccaggctcactgaccacccctcctcttctggaatgtgtgacctggattgtgctcaaggaacccatcagcgtcagcagcgagcaggtgttgaaattccgtaaacttaacttcaatggggagggtgaacccgaagaactgatggtggacaactggcgcccagctcagccactgaagaacaggcaaatcaaagcttccttcaaa

SEQ ID NO: 5735 - protein, 259 aa, Artificial Sequence
  source: /note="Description of Artificial Sequence: Synthetic Destabilizing Domain (DD)"
SHHWGYGKHNGPEHWHKDFPIAKGERQSPVDIDTHTAKYDPSLKPLSVSYDQATSLRILNNGHAFNVEFDDSQDKAVLKGGPLDGTYRLIQFHFHWGSLDGQGSEHTVDKKKYAAELHLVHWNTKYGDFGKAVQQPDGLAVLGIFLKVGSAKPGLQKVVDVLDSIKTKGKSADFTNFDPRGLLPESLDYWTVPGSLTTPPLLECVTWIVLKEPISVSSEQVLKFRKLNFNGEGEPEELMVDNWRPAQPLKNRQIKASFF

SEQ ID NO: 5736 - DNA, 777 bp, Artificial Sequence
  source: /note="Description of Artificial Sequence: Synthetic Destabilizing Domain (DD)"
tcccatcactgggggtacggcaaacacaacggacctgagcactggcataaggacttccccattgccaagggagagcgccagtcccctgttgacatcgacactcatacagccaagtatgacccttccctgaagcccctgtctgtttcctatgatcaagcaacttccctgaggatcctcaacaatggtcatgctttcaacgtggagtttgatgactctcaggacaaagcagtgctcaagggaggacccctggatggcacttacagattgattcagtttcactttcactggggttcacttgatggacaaggttcagagcatactgtggataaaaagaaatatgctgcagaacttcacttggttcactggaacaccaaatatggggattttgggaaagctgtgcagcaacctgatggactggccgttctaggtatttttttgaaggttggcagcgctaaaccgggccttcagaaagttgttgatgtgctggattccattaaaacaaagggcaagagtgctgacttcactaacttcgatcctcgtggcctccttcctgaatccctggattactggaccgttccaggctcactgaccacccctcctcttctggaatgtgtgacctggattgtgctcaaggaacccatcagcgtcagcagcgagcaggtgttgaaattccgtaaacttaacttcaatggggagggtgaacccgaagaactgatggtggacaactggcgcccagctcagccactgaagaacaggcaaatcaaagcttccttcttt

SEQ ID NO: 5737 - protein, 259 aa, Artificial Sequence
  source: /note="Description of Artificial Sequence: Synthetic Destabilizing Domain (DD)"
SHHWGYGKHNGPEHWHKDFPIAKGERQSPVDIDTHTAKYDPSLKPLSVSYDQATSLRILNNDHAFNVEFDDSQDKAVLKGGPLDGTYRLIQFHFHWGSLDGQGSEHTVDKKKYAAELHLVHWNTKYGDFGKAVQQPDGLAVLGIFLKVGSAKPGLQKVVDVLDSIKTKGKSADFTNFDPRGLLPESLDYWTYPGSLTTPPLLECVTWIVLKEPISVSSEQVLKFRKLNFNGEGEPEELLVDNWRPAQPLKNRQIKASFK

SEQ ID NO: 5738 - DNA, 777 bp, Artificial Sequence
  source: /note="Description of Artificial Sequence: Synthetic Destabilizing Domain (DD)"
tcccatcactgggggtacggcaaacacaacggacctgagcactggcataaggacttccccattgccaagggagagcgccagtcccctgttgacatcgacactcatacagccaagtatgacccttccctgaagcccctgtctgtttcctatgatcaagcaacttccctgaggatcctcaacaatgatcatgctttcaacgtggagtttgatgactctcaggacaaagcagtgctcaagggaggacccctggatggcacttacagattgattcagtttcactttcactggggttcacttgatggacaaggttcagagcatactgtggataaaaaaaaatatgctgcagaacttcacttggttcactggaacaccaaatatggggattttgggaaagctgtgcagcaacctgatggactggccgttctaggtatttttttgaaggttggcagcgctaaaccgggccttcagaaagttgttgatgtgctggattccattaaaacaaagggcaagagtgctgacttcactaacttcgatcctcgtggcctccttcctgaatccctggattactggacctacccaggctcactgaccacccctcctcttctggaatgtgtgacctggattgtgctcaaggaacccatcagcgtcagcagcgagcaggtgttgaaattccgtaaacttaacttcaatggggagggtgaacccgaagaactgcttgtggacaactggcgcccagctcagccactgaagaacaggcaaatcaaagcttccttcaaa

SEQ ID NO: 5739 - protein, 259 aa, Artificial Sequence
  source: /note="Description of Artificial Sequence: Synthetic Destabilizing Domain (DD)"
SHHWGYGKHNGPEHWHKDFPIAKGERQSPVDIDTHTAKYDPSLKPLSVSYDQATSLRILNNGHAFNVEFDDSQDKAVLKGGPLDGTYRLIQFHFHWGSLDGQGSEHTVDKKKYAAELHLVHWNTKYGDFGKAFQQPDGLAVLGIFLKVGSAKPGLQKVVDVLDSIKTKGKSADFTNFDPRGLLPESLDYWTYPGSLTTPPLLECVTWIVLKEPISVSSEQVLKFRKFNFNGEGEPEELMVDNWRPAQPLKNRQIKASFK

SEQ ID NO: 5740 - DNA, 777 bp, Artificial Sequence
  source: /note="Description of Artificial Sequence: Synthetic Destabilizing Domain (DD)"
tcccatcactgggggtacggcaaacacaacggacctgagcactggcataaggacttccccattgccaagggagagcgccagtcccctgttgacatcgacactcatacagccaagtatgacccttccctgaagcccctgtctgtttcctatgatcaagcaacttccctgaggatcctcaacaatggtcatgctttcaacgtggagtttgatgactctcaggacaaagcagtgctcaagggaggacccctggatggcacttacagattgattcagtttcactttcactggggttcacttgatggacaaggttcagagcatactgtggataaaaagaaatatgctgcagaacttcacttggttcactggaacaccaaatatggggattttgggaaagcttttcagcaacctgatggactggccgttctaggtatttttttgaaggttggcagcgctaaaccgggccttcagaaagttgttgatgtgctggattccattaaaacaaagggcaagagtgctgacttcactaacttcgatcctcgtggcctccttcctgaatccctggattactggacctacccaggctcactgaccacccctcctcttctggaatgtgtgacctggattgtgctcaaggaacccatcagcgtcagcagcgagcaggtgttgaaattccgtaaatttaacttcaatggggagggtgaacccgaagaactgatggtggacaactggcgcccagctcagccactgaagaacaggcaaatcaaagcttccttcaaa

SEQ ID NO: 5741 - protein, 259 aa, Artificial Sequence
  source: /note="Description of Artificial Sequence: Synthetic Destabilizing Domain (DD)"
SHHWGYGKHNGPEHWHKDFPIAKGERQSPVDIDTHTAKYDPSLKPLSVSYDQATSLRILNNGHAFNVEFGDSQDKAVLKGGPLDGTYRLIQFHFHWGSLDGQGSEHTVDKKKYAAELHLVHWNTKYGDFGKAVQQPDGLAVLGIFLKVGSAKPGLQKVVDVLDSIKTKGKSADFTNFDPRGLLPESLDYWTYPGSLTTPPLLECVTWIVLKEPISVSSEQVLKFRKLNFKGEGEPEELMVDNWRPAQPLKNRQIKASFK

SEQ ID NO: 5742 - DNA, 777 bp, Artificial Sequence
  source: /note="Description of Artificial Sequence: Synthetic Destabilizing Domain (DD)"
tcccatcactgggggtacggcaaacacaacggacctgagcactggcataaggacttccccattgccaagggagagcgccagtcccctgttgacatcgacactcatacagccaagtatgacccttccctgaagcccctgtctgtttcctatgatcaagcaacttccctgaggatcctcaacaatggtcatgctttcaacgtggagtttggtgactctcaggacaaagcagtgctcaagggaggacccctggatggcacttacagattgattcagtttcactttcactggggttcacttgatggacaaggttcagagcatactgtggataaaaagaaatatgctgcagaacttcacttggttcactggaacaccaaatatggggattttgggaaagctgtgcagcaacctgatggactggccgttctaggtatttttttgaaggttggcagcgctaaaccgggccttcagaaagttgttgatgtgctggattccattaaaacaaagggcaagagtgctgacttcactaacttcgatcctcgtggcctccttcctgaatccctggattactggacctacccaggctcactgaccacccctcctcttctggaatgtgtgacctggattgtgctcaaggaacccatcagcgtcagcagcgagcaggtgttgaaattccgtaaacttaacttcaagggggagggtgaacccgaagaactgatggtggacaactggcgcccagctcagccactgaagaacaggcaaatcaaagcttccttcaaa

SEQ ID NO: 5743 - protein, 259 aa, Artificial Sequence
  source: /note="Description of Artificial Sequence: Synthetic Destabilizing Domain (DD)"
SHHWGYGKHNGPEHWHKDFPIAKGERQSPVDIDTHTAKYDPSLKPLSVSYDQATFLRILNNGHAFNVEFSDSQDKAVLKGGPLDGTYRLIQFHFHWGSLDGQGSEHTVDKKKYAAELHLVHWNTKYGDFGKAVQQPDGLAVLGIFLKVGSAKPGLQKVVDVLDSIKTKGKSADFTNFDPRGLLPESLDYWTYPGSLTTPPLLECVTWIVLKEPISVSSEQVLKFRKLNFNGEGEPEELMVDNWRPAQPLKNRQIKASFK

SEQ ID NO: 5744 - DNA, 777 bp, Artificial Sequence
  source: /note="Description of Artificial Sequence: Synthetic Destabilizing Domain (DD)"
tcccatcactgggggtacggcaaacacaacggacctgagcactggcataaggacttccccattgccaagggagagcgccagtcccctgttgacatcgacactcatacagccaagtatgacccttccctgaagcccctgtctgtttcctatgatcaagcaacttttctgaggatcctcaacaatggtcatgctttcaacgtggagtttagtgactctcaggacaaagcagtgctcaagggaggacccctggatggcacttacagattgattcagtttcactttcactggggttcacttgatggacaaggttcagagcatactgtggataaaaagaaatatgctgcagaacttcacttggttcactggaacaccaaatatggggattttgggaaagctgtgcagcaacctgatggactggccgttctaggtatttttttgaaggttggcagcgctaaaccgggccttcagaaagttgttgatgtgctggattccattaaaacaaagggcaagagtgctgacttcactaacttcgatcctcgtggcctccttcctgaatccctggattactggacctacccaggctcactgaccacccctcctcttctggaatgtgtgacctggattgtgctcaaggaacccatcagcgtcagcagcgagcaggtgttgaaattccgtaaacttaacttcaatggggagggtgaacccgaagaactgatggtggacaactggcgcccagctcagccactgaagaacaggcaaatcaaagcttccttcaaa

SEQ ID NO: 5745 - protein, 259 aa, Artificial Sequence
  source: /note="Description of Artificial Sequence: Synthetic Destabilizing Domain (DD)"
SHHWGYGKHNGPEHWHKDFPIAKGERQSPVDIDTHTAKYDPSLKPLSVSYLQATSLRILNNGHAFNVEFDDSQDKAVLKGGPLDGTYRLIQFHFHWGSLDGQGSEHTVDKKKYAAELHLVHWNTKYRDFGKAVQQPDGLAVLGIFLKVGSAKPGLQKVVDVLDSIKTKGKSADFTNFDPRGLLPESLDYWTYPGSLTTPPLLECVTWIVLKEPISVSSEQVLKFRKLNFNGEGEPEELMVDNWRPAFPLKNRQIKASFK

SEQ ID NO: 5746 - DNA, 777 bp, Artificial Sequence
  source: /note="Description of Artificial Sequence: Synthetic Destabilizing Domain (DD)"
tcccatcactgggggtacggcaaacacaacggacctgagcactggcataaggacttccccattgccaagggagagcgccagtcccctgttgacatcgacactcatacagccaagtatgacccttccctgaagcccctgtctgtttcctatctgcaagcaacttccctgaggatcctcaacaatggtcatgctttcaacgtggagtttgatgactctcaggacaaagcagtgctcaagggaggacccctggatggcacttacagattgattcagtttcactttcactggggttcacttgatggacaaggttcagagcatactgtggataaaaagaaatatgctgcagaacttcacttggttcactggaacaccaaatatagagattttgggaaagctgtgcagcaacctgatggactggccgttctaggtatttttttgaaggttggcagcgctaaaccgggccttcagaaagttgttgatgtgctggattccattaaaacaaagggcaagagtgctgacttcactaacttcgatcctcgtggcctccttcctgaatccctggattactggacctacccaggctcactgaccacccctcctcttctggaatgtgtgacctggattgtgctcaaggaacccatcagcgtcagcagcgagcaggtgttaaaattccgtaaacttaacttcaatggggagggtgaacccgaagaactgatggtggacaactggcgcccagcttttccactgaagaacaggcaaatcaaagcttccttcaaa

SEQ ID NO: 5747 - protein, 259 aa, Artificial Sequence
  source: /note="Description of Artificial Sequence: Synthetic Destabilizing Domain (DD)"
  MOD_RES (72)..(72): Any amino acid
  MOD_RES (88)..(88): Any amino acid
SHHWGYGKHNGPEHWHKDFPIAKGERQSPVDIDTHTAKYDPSLKPLSVSYDQATSLRILNNGHAFNVEFDDXQDKAVLKGGPLDGTYXLIQFHFHWGSLDGQGSEHTVDKKKYAAELHLVHWNTKYGDFGKAVQQPDGLAVLGIFLKVGSAKPGLQKVVDVLDSIKTKGKSADFTNFDPRGLLPESLDYWTYPGSLTTPPLLECVTWIVLKEPISVSSEQVLKFRKLNFNGEGEPEELMVDNWRPAQPLKNRQIKASFK

SEQ ID NO: 5748 - DNA, 777 bp, Artificial Sequence
  source: /note="Description of Artificial Sequence: Synthetic Destabilizing Domain (DD)"
tcccatcactgggggtacggcaaacacaacggacctgagcactggcataaggacttccccattgccaagggagagcgccagtcccctgttgacatcgacactcatacagccaagtatgacccttccctgaagcccctgtctgtttcctatgatcaagcaacttccctgaggatcctcaacaatggtcatgctttcaacgtggagtttgatgacwmtcaggacaaagcagtgctcaagggaggacccctggatggcacttacttwttgattcagtttcactttcactggggttcacttgatggacaaggttcagagcatactgtggataaaaagaaatatgctgcagaacttcacttggttcactggaacaccaaatatggggattttgggaaagctgtgcagcaacctgatggactggccgttctaggtatttttttgaaggttggcagcgctaaaccgggccttcagaaagttgttgatgtgctggattccattaaaacaaagggcaagagtgctgacttcactaacttcgatcctcgtggcctccttcctgaatccctggattactggacctacccaggctcactgaccacccctcctcttctggaatgtgtgacctggattgtgctcaaggaacccatcagcgtcagcagcgagcaggtgttgaaattccgtaaacttaacttcaatggggagggtgaacccgaagaactgatggtggacaactggcgcccagctcagccactgaagaacaggcaaatcaaagcttccttcaaa

SEQ ID NO: 5749 - protein, 259 aa, Artificial Sequence
  source: /note="Description of Artificial Sequence: Synthetic Destabilizing Domain (DD)"
  MOD_RES (192)..(192): Any amino acid
SHHWGYGKHNGPEHWHKDFPIAKGERQSPVDIDTHTAKYDPSLKPLSVSYDQATSLRILNNGHAFNVEFDDSQDKAVLKGGPLDGTYRLIQFHFHWGSLDGQGSEHTVDKKKYAAELHLVHWNTKYGDFGKAVQQPDGLAVLGIFLKVGSAKPGLQKVVDVLDSIKTKGKSADFTNFDPRGLLPESLDYWTXPGSLTTPPLLECVTWIVLKEPISVSSEQVLKFRKLNFNGEGEPEELMVDNWRPAQPLKNRQIKASFK

SEQ ID NO: 5750 - DNA, 777 bp, Artificial Sequence
  source: /note="Description of Artificial Sequence: Synthetic Destabilizing Domain (DD)"
tcccatcactgggggtacggcaaacacaacggacctgagcactggcataaggacttccccattgccaagggagagcgccagtcccctgttgacatcgacactcatacagccaagtatgacccttccctgaagcccctgtctgtttcctatgatcaagcaacttccctgaggatcctcaacaatggtcatgctttcaacgtggagtttgatgactctcaggacaaagcagtgctcaagggaggacccctggatggcacttacagattgattcagtttcactttcactggggttcacttgatggacaaggttcagagcatactgtggataaaaagaaatatgctgcagaacttcacttggttcactggaacaccaaatatggggattttgggaaagctgtgcagcaacctgatggactggccgttctaggtatttttttgaaggttggcagcgctaaaccgggccttcagaaagttgttgatgtgctggattccattaaaacaaagggcaagagtgctgacttcactaacttcgatcctcgtggcctccttcctgaatccctggattactggaccwwyccaggctcactgaccacccctcctcttctggaatgtgtgacctggattgtgctcaaggaacccatcagcgtcagcagcgagcaggtgttgaaattccgtaaacttaacttcaatggggagggtgaacccgaagaactgatggtggacaactggcgcccagctcagccactgaagaacaggcaaatcaaagcttccttcaaa

SEQ ID NO: 5751 - protein, 259 aa, Artificial Sequence
  source: /note="Description of Artificial Sequence: Synthetic Destabilizing Domain (DD)"
  MOD_RES (50)..(50): Any amino acid
  MOD_RES (71)..(71): Any amino acid
  MOD_RES (240)..(240): Any amino acid
  MOD_RES (248)..(248): Any amino acid
SHHWGYGKHNGPEHWHKDFPIAKGERQSPVDIDTHTAKYDPSLKPLSVSXDQATSLRILNNGHAFNVEFDXSQDKAVLKGGPLDGTYRLIQFHFHWGSLDGQGSEHTVDKKKYAAELHLVHWNTKYGDFGKAVQQPDGLAVLGIFLKVGSAKPGLQKVVDVLDSIKTKGKSADFTNFDPRGLLPESLDYWTYPGSLTTPPLLECVTWIVLKEPISVSSEQVLKFRKLNFNGEGEPEELMXDNWRPAQXLKNRQIKASFK

SEQ ID NO: 5752 - DNA, 777 bp, Artificial Sequence
  source: /note="Description of Artificial Sequence: Synthetic Destabilizing Domain (DD)"
tcccatcactgggggtacggcaaacacaacggacctgagcactggcataaggacttccccattgccaagggagagcgccagtcccctgttgacatcgacactcatacagccaagtatgacccttccctgaagcccctgtctgtttccwmtgatcaagcaacttccctgaggatcctcaacaatggtcatgctttcaacgtggagtttgatkwytctcaggacaaagcagtgctcaagggaggacccctggatggcacttacagattgattcagtttcactttcactggggttcacttgatggacaaggttcagagcatactgtggataaaaagaaatatgctgcagaacttcacttggttcactggaacaccaaatatggggattttgggaaagctgtgcagcaacctgatggactggccgttctaggtatttttttgaaggttggcagcgctaaaccgggccttcagaaagttgttgatgtgctggattccattaaaacaaagggcaagagtgctgacttcactaacttcgatcctcgtggcctccttcctgaatccctggattactggacctacccaggctcactgaccacccctcctcttctggaatgtgtgacctggattgtgctcaaggaacccatcagcgtcagcagcgagcaggtgttgaaattccgtaaacttaacttcaatggggagggtgaacccgaagaactgatgktkgacaactggcgcccagctcagyyactgaagaacaggcaaatcaaagcttccttcaaa

SEQ ID NO: 5753 - protein, 259 aa, Artificial Sequence
  source: /note="Description of Artificial Sequence: Synthetic Destabilizing Domain (DD)"
SHHWGYGKHNGPEHWHKDFPIAKGERQSPVDIDTHTAKYDPSLKPLSVSYDQATSLRILNNGHAFNVEFDISQDKAVLKGGPLDGTYRLIQFHFHCGSLDGQGSEHTVDKKKYAAELHLVHWNTKYGDFGKAVQQPDGLAVLGIFLKVGSAKPGLQKVVDVLDSIKTKGKSADFTNFDPRGLLPESLDYWTYPGSLTTPPLLECVTWIVLKEPISVSSEQVLKFRKLNFNGEGEPEELMVDNWRPAQPLKNRQIKASFK

SEQ ID NO: 5754 - DNA, 777 bp, Artificial Sequence
  source: /note="Description of Artificial Sequence: Synthetic Destabilizing Domain (DD)"
tcccatcactgggggtacggcaaacacaacggacctgagcactggcataaggacttccccattgccaagggagagcgccagtcccctgttgacatcgacactcatacagccaagtatgacccttccctgaagcccctgtctgtttcctatgatcaagcaacttccctgaggatcctcaacaatggtcatgctttcaacgtggagtttgatatttctcaggacaaagcagtgctcaagggaggacccctggatggcacttacagattgattcagtttcactttcactgcggttcacttgatggacaaggttcagagcatactgtggataaaaagaaatatgctgcagaacttcacttggttcactggaacaccaaatatggggattttgggaaagctgtgcagcaacctgatggactggccgttctaggtatttttttgaaggttggcagcgctaaaccgggccttcagaaagttgttgatgtgctggattccattaaaacaaagggcaagagtgctgacttcactaacttcgatcctcgtggcctccttcctgaatccctggattactggacctacccaggctcactgaccacccctcctcttctggaatgtgtgacctggattgtgctcaaggaacccatcagcgtcagcagcgagcaggtgttgaaattccgtaaacttaacttcaatggggagggtgaacccgaagaactgatggtggacaactggcgcccagctcagccactgaagaacaggcaaatcaaagcttccttcaaa

SEQ ID NO: 5755 - protein, 259 aa, Artificial Sequence
  source: /note="Description of Artificial Sequence: Synthetic Destabilizing Domain (DD)"
SHHWGYGKHNGPEHWHKDFPIAKGERQSPVDIDTHTAKYDPSLKPLSVSYDQATSLRILNNGHAFNVEFKDSQDKAVLKGGPLDGTYRLIQFHFHWGSLDGQGSEHTVDKKKYAAELHLVHWNTKYGDFGKAVQQPDGLAVLGIFLKVGSAKPGLQKVVDVLDSIKTKGKSADFTNFDPRGLLPESLDYWFYPGSLTTPPLLECVTWIVLKEPISVSSEQVLKFRKLNFFGEGEPEELMVDNWRPAQPLKNRQIKASFK

SEQ ID NO: 5756 - DNA, 777 bp, Artificial Sequence
  source: /note="Description of Artificial Sequence: Synthetic Destabilizing Domain (DD)"
tcccatcactgggggtacggcaaacacaacggacctgagcactggcataaggacttccccattgccaagggagagcgccagtcccctgttgacatcgacactcatacagccaagtatgacccttccctgaagcccctgtctgtttcctatgatcaagcaacttccctgaggatcctcaacaatggtcatgctttcaacgtggagtttaaggactctcaggacaaagcagtgctcaagggaggacccctggatggcacttacagattgattcagtttcactttcactggggttcacttgatggacaaggttcagagcatactgtggataaaaagaaatatgctgcagaacttcacttggttcactggaacaccaaatatggggattttgggaaagctgtgcagcaacctgatggactggccgttctaggtatttttttgaaggttggcagcgctaaaccgggccttcagaaagttgttgatgtgctggattccattaaaacaaagggcaagagtgctgacttcactaacttcgatcctcgtggcctccttcctgaatccctggattactggttttacccaggctcactgaccacccctcctcttctggaatgtgtgacctggattgtgctcaaggaacccatcagcgtcagcagcgagcaggtgttgaaattccgtaaacttaacttctttggggagggtgaacccgaagaactgatggtggacaactggcgcccagctcagccactgaagaacaggcaaatcaaagcttccttcaaa

SEQ ID NO: 5757 - protein, 259 aa, Artificial Sequence
  source: /note="Description of Artificial Sequence: Synthetic Destabilizing Domain (DD)"
SHHWGYGKHNGPEHWHKDFPIAKGERQSPVDIDTHTAKYDPSLKPLSVSYDQATSLRNLNNGHAFNVEFDDSQDKAVLKGGPLDGTYRLIQFHFHWGSLDRQGSEHTVDKKKYAAELHLVHWNTKYGDFGKAVQQPDGLAVLGIFLKVGSAKPGLQKVVDVLDSIKTKGKSADFTNFDPRGLLPESLDYWTYPGSLTTPPLLECVTWIVLKEPISVSSEQVLKFRKLNFNGEGEPEELMVDNWRPAQPLKNRQIKASFK

SEQ ID NO: 5758 - DNA, 777 bp, Artificial Sequence
  source: /note="Description of Artificial Sequence: Synthetic Destabilizing Domain (DD)"
tcccatcactgggggtacggcaaacacaacggacctgagcactggcataaggacttccccattgccaagggagagcgccagtcccctgttgacatcgacactcatacagccaagtatgacccttccctgaagcccctgtctgtttcctatgatcaagcaacttccctgagaaacctcaacaatggtcatgctttcaacgtggagtttgatgactctcaggacaaagcagtgctcaagggaggacccctggatggcacttacagattgattcagtttcactttcactggggttcacttgatcgacaaggttcagagcatactgtggataaaaagaaatatgctgcagaacttcacttggttcactggaacaccaaatatggggattttgggaaagctgtgcagcaacctgatggactggccgttctaggtatttttttgaaggttggcagcgctaaaccgggccttcagaaagttgttgatgtgctggattccattaaaacaaagggcaagagtgctgacttcactaacttcgatcctcgtggcctccttcctgaatccctggattactggacctacccaggctcactgaccacccctcctcttctggaatgtgtgacctggattgtgctcaaggaacccatcagcgtcagcagcgagcaggtgttgaaattccgtaaacttaacttcaatggggagggtgaacccgaagaactgatggtggacaactggcgcccagctcagccactgaagaacaggcaaatcaaagcttccttcaaa

SEQ ID NO: 5759 - protein, 259 aa, Artificial Sequence
  source: /note="Description of Artificial Sequence: Synthetic Destabilizing Domain (DD)"
SHHWGYGKHNGPEHWHKDFPIAKGERQSPVDIDTHTAKYDPSLKPLSVSYDQATSLRILNNGHAFNVEFDDSQDKAVLKGGPLDGTYRLIQFHFHWGSLDGQGSEHTVDKKKYAAELHLVHWNTKYGDFGKAVQQPDGLAVLGIFLKVGSAKPGHQKVVDVLDSIKTKGKSADFTNFDPRGLLPESLDYWTYPGSLTTPPLLECVTWIVLKEPISVSSEQVLKFRKLNFNGEGEPEELMVDNWRPAQPLKNRQIKASFK

SEQ ID NO: 5760 - DNA, 777 bp, Artificial Sequence
  source: /note="Description of Artificial Sequence: Synthetic Destabilizing Domain (DD)"
tcccatcactgggggtacggcaaacacaacggacctgagcactggcataaggacttccccattgccaagggagagcgccagtcccctgttgacatcgacactcatacagccaagtatgacccttccctgaagcccctgtctgtttcctatgatcaagcaacttccctgagaatcctcaacaatggtcatgctttcaacgtggagtttgatgactctcaggacaaagcagtgctcaagggaggacccctggatggcacttacagattgattcagtttcactttcactggggttcacttgatggacaaggttcagagcatactgtggataaaaagaaatatgctgcagaacttcacttggttcactggaacaccaaatatggggattttgggaaagctgtgcagcaacctgatggactggccgttctaggtatttttttgaaggttggcagcgctaaaccgggccatcagaaagttgttgatgtgctggattccattaaaacaaagggcaagagtgctgacttcactaacttcgatcctcgtggcctccttcctgaatccctggattactggacctacccaggctcactgaccacccctcctcttctggaatgtgtgacctggattgtgctcaaggaacccatcagcgtcagcagcgagcaggtgttgaaattccgtaaacttaacttcaatggggagggtgaacccgaagaactgatggtggacaactggcgcccagctcagccactgaagaacaggcaaatcaaagcttccttcaaa

SEQ ID NO: 5761 - protein, 260 aa, Artificial Sequence
  source: /note="Description of Artificial Sequence: Synthetic Destabilizing Domain (DD)"
MSHHWGYGKHNGPEHWHKDFPIAKGERQSPVDIDTHTAKYDPSLKPLSVSYDQATSLRILNNGHAFNVEFDDSQDKAVLKGGPLDGTYRLIQFHFHWGSLDGQGSEHTVDKKKYAAELHLVHWNTKYGDFGKAVQQPDGLAVLGIFLKVGSAKPGHQKVVDVLDSIKTKGKSADFTNFDPRGLLPESLDYWTYPGSLTTPPLLECVTWIVLKEPISVSSEQVLKFRKLNFNGEGEPEELMVDNWRPAQPLKNRQIKASFK

SEQ ID NO: 5762 - DNA, 780 bp, Artificial Sequence
  source: /note="Description of Artificial Sequence: Synthetic Destabilizing Domain (DD)"
atgtcccatcactgggggtacggcaaacacaacggacctgagcactggcataaggacttccccattgccaagggagagcgccagtcccctgttgacatcgacactcatacagccaagtatgacccttccctgaagcccctgtctgtttcctatgatcaagcaacttccctgagaatcctcaacaatggtcatgctttcaacgtggagtttgatgactctcaggacaaagcagtgctcaagggaggacccctggatggcacttacagattgattcagtttcactttcactggggttcacttgatggacaaggttcagagcatactgtggataaaaagaaatatgctgcagaacttcacttggttcactggaacaccaaatatggggattttgggaaagctgtgcagcaacctgatggactggccgttctaggtatttttttgaaggttggcagcgctaaaccgggccatcagaaagttgttgatgtgctggattccattaaaacaaagggcaagagtgctgacttcactaacttcgatcctcgtggcctccttcctgaatccctggattactggacctacccaggctcactgaccacccctcctcttctggaatgtgtgacctggattgtgctcaaggaacccatcagcgtcagcagcgagcaggtgttgaaattccgtaaacttaacttcaatggggagggtgaacccgaagaactgatggtggacaactggcgcccagctcagccactgaagaacaggcaaatcaaagcttccttcaaa

SEQ ID NO: 5763-5798 - skipped (36 entries)

SEQ ID NO: 5799 - DNA, 783 bp, Artificial Sequence
  source: /note="Description of Artificial Sequence: Synthetic Construct"
atgatcgaaacatacaaccaaacttctccccgatctgcggccactggactgcccatcagcatgaaaatttttatgtatttacttactgtttttcttatcacccagatgattgggtcagcactttttgctgtgtatcttcatagaaggttggacaagatagaagatgaaaggaatcttcatgaagattttgtattcatgaaaacgatacagagatgcaacacaggagaaagatccttatccttactgaactgtgaggagattaaaagccagtttgaaggctttgtgaaggatataatgttaaacaaagaggagacgaagaaagaaaacagctttgaaatgcaaaaaggtgatcagaatcctcaaattgcggcacatgtcataagtgaggccagcagtaaaacaacatctgtgttacagtgggctgaaaaaggatactacaccatgagcaacaacttggtaaccctggaaaatgggaaacagctgaccgttaaaagacaaggactctattatatctatgcccaagtcaccttctgttccaatcgggaagcttcgagtcaagctccatttatagccagcctctgcctaaagtcccccggtagattcgagagaatcttactcagagctgcaaatacccacagttccgccaaaccttgcgggcaacaatccattcacttgggaggagtatttgaattgcaaccaggtgcttcggtgtttgtcaatgtgactgatccaagccaagtgagccatggcactggcttcacgtcctttggcttactcaaactc

SEQ ID NO: 5800 - protein, 149 aa, Artificial Sequence
  source: /note="Description of Artificial Sequence: Synthetic Construct"
MQKGDQNPQIAAHVISEASSKTTSVLQWAEKGYYTMSNNLVTLENGKQLTVKRQGLYYIYAQVTFCSNREASSQAPFIASLCLKSPGRFERILLRAANTHSSAKPCGQQSIHLGGVFELQPGASVFVNVTDPSQVSHGTGFTSFGLLKL

SEQ ID NO: 5801 - DNA, 447 bp, Artificial Sequence
  source: /note="Description of Artificial Sequence: Synthetic Construct"
atgcaaaaaggtgatcagaatcctcaaattgcggcacatgtcataagtgaggccagcagtaaaacaacatctgtgttacagtgggctgaaaaaggatactacaccatgagcaacaacttggtaaccctggaaaatgggaaacagctgaccgttaaaagacaaggactctattatatctatgcccaagtcaccttctgttccaatcgggaagcttcgagtcaagctccatttatagccagcctctgcctaaagtcccccggtagattcgagagaatcttactcagagctgcaaatacccacagttccgccaaaccttgcgggcaacaatccattcacttgggaggagtatttgaattgcaaccaggtgcttcggtgtttgtcaatgtgactgatccaagccaagtgagccatggcactggcttcacgtcctttggcttactcaaactc

SEQ ID NO: 5802 - protein, 248 aa, Artificial Sequence
  source: /note="Description of Artificial Sequence: Synthetic Construct"
ATGLPISMKIFMYLLTVFLITQMIGSALFAVYLHRRLDKIEDERNLHEDFVFMKTIQRCNTGERSLSLLNCEEIKSQFEGFVKDIMLNKEETKKENSFEMQKGDQNPQIAAHVISEASSKTTSVLQWAEKGYYTMSNNLVTLENGKQLTVKRQGLYYIYAQVTFCSNREASSQAPFIASLCLKSPGRFERILLRAANTHSSAKPCGQQSIHLGGVFELQPGASVFVNVTDPSQVSHGTGFTSFGLLKL

SEQ ID NO: 5803 - DNA, 744 bp, Artificial Sequence
  source: /note="Description of Artificial Sequence: Synthetic Construct"
gccactggactgcccatcagcatgaaaatttttatgtatttacttactgtttttcttatcacccagatgattgggtcagcactttttgctgtgtatcttcatagaaggttggacaagatagaagatgaaaggaatcttcatgaagattttgtattcatgaaaacgatacagagatgcaacacaggagaaagatccttatccttactgaactgtgaggagattaaaagccagtttgaaggctttgtgaaggatataatgttaaacaaagaggagacgaagaaagaaaacagctttgaaatgcaaaaaggtgatcagaatcctcaaattgcggcacatgtcataagtgaggccagcagtaaaacaacatctgtgttacagtgggctgaaaaaggatactacaccatgagcaacaacttggtaaccctggaaaatgggaaacagctgaccgttaaaagacaaggactctattatatctatgcccaagtcaccttctgttccaatcgggaagcttcgagtcaagctccatttatagccagcctctgcctaaagtcccccggtagattcgagagaatcttactcagagctgcaaatacccacagttccgccaaaccttgcgggcaacaatccattcacttgggaggagtatttgaattgcaaccaggtgcttcggtgtttgtcaatgtgactgatccaagccaagtgagccatggcactggcttcacgtcctttggcttactcaaactc

SEQ ID NO: 5804 - protein, 254 aa, Artificial Sequence
  source: /note="Description of Artificial Sequence: Synthetic Construct"
MIETYNQTSPRSAATGLPISMKIFMYLLTVFLITQMIGSALFAVYLHRRLDKIEDERNLHEDFVFMKTIQRCNTGERSLSLLNCEEIKSQFEGFVKDIMLNKEETKKENDQNPQIAAHVISEASSKTTSVLQWAEKGYYTMSNNLVTLENGKQLTVKRQGLYYIYAQVTFCSNREASSQAPFIASLCLKSPGRFERILLRAANTHSSAKPCGQQSIHLGGVFELQPGASVFVNVTDPSQVSHGTGFTSFGLLKL

SEQ ID NO: 5805 - DNA, 762 bp, Artificial Sequence
  source: /note="Description of Artificial Sequence: Synthetic Construct"
atgatcgaaacatacaaccaaacttctccccgatctgcggccactggactgcccatcagcatgaaaatttttatgtatttacttactgtttttcttatcacccagatgattgggtcagcactttttgctgtgtatcttcatagaaggttggacaagatagaagatgaaaggaatcttcatgaagattttgtattcatgaaaacgatacagagatgcaacacaggagaaagatccttatccttactgaactgtgaggagattaaaagccagtttgaaggctttgtgaaggatataatgttaaacaaagaggagacgaagaaagaaaacgatcagaatcctcaaattgcggcacatgtcataagtgaggccagcagtaaaacaacatctgtgttacagtgggctgaaaaaggatactacaccatgagcaacaacttggtaaccctggaaaatgggaaacagctgaccgttaaaagacaaggactctattatatctatgcccaagtcaccttctgttccaatcgggaagcttcgagtcaagctccatttatagccagcctctgcctaaagtcccccggtagattcgagagaatcttactcagagctgcaaatacccacagttccgccaaaccttgcgggcaacaatccattcacttgggaggagtatttgaattgcaaccaggtgcttcggtgtttgtcaatgtgactgatccaagccaagtgagccatggcactggcttcacgtcctttggcttactcaaactc

SEQ ID NO: 5806 - protein, 12 aa, Artificial Sequence
  source: /note="Description of Artificial Sequence: Synthetic Linker"
GGSGGGSGGGSG

SEQ ID NO: 5807 - DNA, 36 bp, Artificial Sequence
  source: /note="Description of Artificial Sequence: Synthetic Linker"
ggaggatccggaggtggaagtggaggtggatctggt

SEQ ID NO: 5808 - protein, 533 aa, Artificial Sequence
  source: /note="Description of Artificial Sequence: Synthetic construct"
MSHHWGYGKHNGPEHWHKDFPIAKGERQSPVDIDTHTAKYDPSLKPLSVSYDQATSLRILNNGHAFNVEFDDSQDKAVLKGGPLDGTYRLIQFHFHWGSLDGQGSEHTVDKKKYAAELHLVHWNTKYGDFGKAVQQPDGLAVLGIFLKVGSAKPGHQKVVDVLDSIKTKGKSADFTNFDPRGLLPESLDYWTYPGSLTTPPLLECVTWIVLKEPISVSSEQVLKFRKLNFNGEGEPEELMVDNWRPAQPLKNRQIKASFKGGSGGGSGGGSGMIETYNQTSPRSAATGLPISMKIFMYLLTVFLITQMIGSALFAVYLHRRLDKIEDERNLHEDFVFMKTIQRCNTGERSLSLLNCEEIKSQFEGFVKDIMLNKEETKKENSFEMQKGDQNPQIAAHVISEASSKTTSVLQWAEKGYYTMSNNLVTLENGKQLTVKRQGLYYIYAQVTFCSNREASSQAPFIASLCLKSPGRFERILLRAANTHSSAKPCGQQSIHLGGVFELQPGASVFVNVTDPSQVSHGTGFTSFGLLKL

SEQ ID NO: 5809 - DNA, 1602 bp, Artificial Sequence
  source: /note="Description of Artificial Sequence: Synthetic construct"
atgtcccatcactgggggtacggcaaacacaacggacctgagcactggcataaggacttccccattgccaagggagagcgccagtcccctgttgacatcgacactcatacagccaagtatgacccttccctgaagcccctgtctgtttcctatgatcaagcaacttccctgagaatcctcaacaatggtcatgctttcaacgtggagtttgatgactctcaggacaaagcagtgctcaagggaggacccctggatggcacttacagattgattcagtttcactttcactggggttcacttgatggacaaggttcagagcatactgtggataaaaagaaatatgctgcagaacttcacttggttcactggaacaccaaatatggggattttgggaaagctgtgcagcaacctgatggactggccgttctaggtatttttttgaaggttggcagcgctaaaccgggccatcagaaagttgttgatgtgctggattccattaaaacaaagggcaagagtgctgacttcactaacttcgatcctcgtggcctccttcctgaatccctggattactggacctacccaggctcactgaccacccctcctcttctggaatgtgtgacctggattgtgctcaaggaacccatcagcgtcagcagcgagcaggtgttgaaattccgtaaacttaacttcaatggggagggtgaacccgaagaactgatggtggacaactggcgcccagctcagccactgaagaacaggcaaatcaaagcttccttcaaaggaggatccggaggtggaagtggaggtggatctggtatgatcgaaacatacaaccaaacttctccccgatctgcggccactggactgcccatcagcatgaaaatttttatgtatttacttactgtttttcttatcacccagatgattgggtcagcactttttgctgtgtatcttcatagaaggttggacaagatagaagatgaaaggaatcttcatgaagattttgtattcatgaaaacgatacagagatgcaacacaggagaaagatccttatccttactgaactgtgaggagattaaaagccagtttgaaggctttgtgaaggatataatgttaaacaaagaggagacgaagaaagaaaacagctttgaaatgcaaaaaggtgatcagaatcctcaaattgcggcacatgtcataagtgaggccagcagtaaaacaacatctgtgttacagtgggctgaaaaaggatactacaccatgagcaacaacttggtaaccctggaaaatgggaaacagctgaccgttaaaagacaaggactctattatatctatgcccaagtcaccttctgttccaatcgggaagcttcgagtcaagctccatttatagccagcctctgcctaaagtcccccggtagattcgagagaatcttactcagagctgcaaatacccacagttccgccaaaccttgcgggcaacaatccattcacttgggaggagtatttgaattgcaaccaggtgcttcggtgtttgtcaatgtgactgatccaagccaagtgagccatggcactggcttcacgtcctttggcttactcaaactctga

SEQ ID NO: 5810 - protein, 260 aa, Homo sapiens
MSHHWGYGKHNGPEHWHKDFPIAKGERQSPVDIDTHTAKYDPSLKPLSVSYDQATSLRILNNGHAFNVEFDDSQDKAVLKGGPLDGTYRLIQFHFHWGSLDGQGSEHTVDKKKYAAELHLVHWNTKYGDFGKAVQQPDGLAVLGIFLKVGSAKPGLQKVVDVLDSIKTKGKSADFTNFDPRGLLPESLDYWTYPGSLTTPPLLECVTWIVLKEPISVSSEQVLKFRKLNFNGEGEPEELMVDNWRPAQPLKNRQIKASFK

SEQ ID NO: 5811 - protein, 22 aa, Artificial Sequence
  source: /note="Description of Artificial Sequence: Synthetic Destabilizing Domain (DD)"
LMVDNWRPAQPLKNRQIKASFK

SEQ ID NO: 5812 - DNA, 708 bp, Artificial Sequence
  source: /note="Description of Artificial Sequence: Synthetic Destabilizing Domain (DD)"
tcccatcactgggggtacggcaaacacaacggacctgagcactggcataaggacttccccattgccaagggagagcgccagtcccctgttgacatcgacactcatacagccaagtatgacccttccctgaagcccctgtctgtttcctatgatcaagcaacttccctgaggatcctcaacaatggtcatgctttcaacgtggagtttgatgactctcaggacaaagcagtgctcaagggaggacccctggatggcacttacagattgattcagtttcactttcactggggttcacttgatggacaaggttcagagcatactgtggataaaaagaaatatgctgcagaacttcacttggttcactggaacaccaaatatggggattttgggaaagctgtgcagcaacctgatggactggccgttctaggtatttttttgaaggttggcagcgctaaaccgggccttcagaaagttgttgatgtgctggattccattaaaacaaagggcaagagtgctgacttcactaacttcgatcctcgtggcctccttcctgaatccctggattactggacctacccaggctcactgaccacccctcctcttctggaatgtgtgacctggattgtgctcaaggaacccatcagcgtcagcagcgagcaggtgttgaaattccgtaaacttaacttcaatggggagggtgaacccgaa

SEQ ID NO: 5813 - DNA, 777 bp, Artificial Sequence
  source: /note="Description of Artificial Sequence: Synthetic Destabilizing Domain (DD)"
tcccatcactgggggtacggcaaacacaacggacctgagcactggcataaggacttccccattgccaagggagagcgccagtcccctgttgacatcgacactcatacagccaagtatgacccttccctgaagcccctgtctgtttcctacgatcaagcaacttccctgaggaacctcaacaatggtcatgctttcaacgtggagtttgatgactctcaggacaaagcagtgctcaagggaggacccctggatggcacttacagattgattcagtttcactttcactggggttcacttgatagacaaggttcagagcatactgtggataaaaagaaatatgctgcagaacttcacttggttcactggaacaccaaatatggggattttgggaaagctgtgcagcaacctgatggactggccgttctaggtatttttttgaaggttggcagcgctaaaccgggccttcagaaagttgttgatgtgctggattccattaaaacaaagggcaagagtgctgacttcactaacttcgatcctcgtggcctccttcctgaatccctggattactggacctacccaggctcactgaccacccctcctcttctggaatgtgtgacctggattgtgctcaaggaacccatcagcgtcagcagcgagcaggtgttgaaattccgtaaacttaacttcaatggggagggtgaacccgaagaactgatggtggacaactggcgcccagctcagccactgaagaacaggcaaatcaaagcttccttcaaa

SEQ ID NO: 5814 - DNA, 777 bp, Artificial Sequence
  source: /note="Description of Artificial Sequence: Synthetic Destabilizing Domain (DD)"
tcccatcactgggggtacggcaaacacaacggacctgagcactggcataaggacttccccattgccaagggagagcgccagtcccctgttgacatcgacactcatacagccaagtatgacccatccctgaagcccctgtctgtttcctacgatcaagcaacttccctgaggaacctcaacaatggtcatgctttcaacgtggagtttgatgactctcaggacaaagcagtgctcaagggaggacccctggatggcacttacagattgattcagtttcactttcactggggttcacttgatagacaaggttcagagcatactgtggataaaaagaaatatgctgcagaacttcacttggttcactggaacaccaaatatggggattttgggaaagctgtgcagcaacctgatggactggccgttctaggtatttttttgaaggttggcagcgctaaaccgggccttcagaaagttgttgatgtgctggattccattaaaacaaagggcaagagtgctgacttcactaacttcgatcctcgtggcctccttcctgaatccctggattactggacctacccaggctcactgaccacccctcctcttctggaatgtgtgacctggattgtgctcaaggaacccatcagcgtcagcagcgagcaggtgttgaaattccgtaaacttaacttcaatggagagggtgaacccgaagaactgatggtggacaactggcgcccagctcagccactgaagaacaggcaaatcaaagcttccttcaaa

SEQ ID NO: 5815 - DNA, 777 bp, Artificial Sequence
  source: /note="Description of Artificial Sequence: Synthetic Destabilizing Domain (DD)"
tcccatcactgggggtacggcaaacacaacggacctgagcactggcataaggacttccccattgccaagggagagcgccagtcccctgttgacatcgacactcatacagccaagtatgacccatccctgaagcccctgtctgtttcctacgatcaagcaacttccctgaggaacctcaacaatggtcatgctttcaacgtggagtttgatgactctcaggacaaagcagtgctcaagggaggacccctggatggcacttacagattgattcagtttcactttcactggggttcacttgatagacaaggttcagagcatactgtggataaaaagaaatatgctgcagaacttcacttggttcactggaacaccaaatatggggattttgggaaagctgtgcagcaacctgatggactggccgttctaggtatttttttgaaggttggcagcgctaaaccgggccttcagaaagttgttgatgtgctggattccattaaaacaaagggcaagagtgctgacttcactaacttcgatcctcgtggcctccttcctgaatccctggattactggacctacccaggctcactgaccacccctcctcttctggaatgtgtgacctggattgtgctcaaggaacccatcagcgtcagcagcgagcaggtgttgaaattccgtaaacttaacttcaatggggagggtgaacccgaagaactgatggtggacaactggcgcccagctcagccactgaagaacaggcaaatcaaagcttccttcaaa

SEQ ID NO: 5816 - DNA, 777 bp, Artificial Sequence
  source: /note="Description of Artificial Sequence: Synthetic Destabilizing Domain (DD)"
tcccatcactgggggtacggcaaacacaacggacctgagcactggcataaggacttccccattgccaagggagagcgccagtcccctgttgacatcgacactcatacagccaagtatgacccttccctgaagcccctgtctgtttcctatgatcaagcaacttccctgaggatcctcaacaatggtcatgctttcaacgtggagtttgatgactctcaggacaaagcagtgctcaagggaggacccctggatggcacttacagattgattcagtttcactttcactggggttcacttgatggacaaggttcagagcatactgtggataaaaagaaatatgctgcagaacttcacttggttcactggaacaccaaatatggggattttgggaaagctgtgcagcaacctgatggactggccgttctaggtatttttttgaaggttggcagcgctaaaccgggccatcagaaagttgttgatgtgctggattccattaaaacaaagggcaagagtgctgacttcactaacttcgatcctcgtggcctccttcctgaatccctggattactggacctacccaggctcactgaccacccctcctcttctggaatgtgtgacctggattgtgctcaaggaacccatcagcgtcagcagcgagcaggtgttgaaattccgtaaacttaacttcaatggggagggtgaacccgaagaactgatggtggacaactggcgcccagctcagccactgaagaacaggcaaatcaaagcttccttcaaa

SEQ ID NO: 5817 - protein, 259 aa, Artificial Sequence
  source: /note="Description of Artificial Sequence: Synthetic Destabilizing Domain (DD)"
SHHWGYGKHNGPEHWHKDFPIAKGERQSPVDIDTQTAKYDPTLKPLSVSFDQATSLRILNNGHAFDVEFDDSQDKAVLKGGPLDGTYRLIQFHFHWGSLDGQGSEHTVDKKKYAAELHLVHWNTKYGDFWKAVQQPDGLAVLGIFLKVGSAKPGLQKVVDVLDSIKTKGKSADFTNFDPRGLLPESLDYWTYPGSLTTPPLLECVTWIVLKEPISVSSEQVLKFHKLNFNGEGEPEELMVDNWRPAQPLKNRQIKASFK

SEQ ID NO: 5818 - DNA, 777 bp, Artificial Sequence
  source: /note="Description of Artificial Sequence: Synthetic Destabilizing Domain (DD)"
tcccatcactgggggtacggcaaacacaacggacctgaacactggcataaggacttccccattgccaagggagagcgccagtcccctgttgacatcgacactcaaacagccaagtatgaccctaccctgaagcccctgtctgtttcctttgatcaagcaacttccctgaggatcctcaataatggtcatgctttcgacgtggagtttgatgactctcaggacaaagcagtgctcaagggaggacccctggatggcacttacagattgattcagtttcactttcactggggttcacttgatggacaaggttcagagcatactgtggataaaaagaaatatgctgcagaacttcacttggttcactggaacaccaaatatggggatttttggaaagctgtgcagcaacctgatggactggccgttctaggtatttttttgaaggttggcagcgctaaaccgggccttcagaaagttgttgatgtgctggattccattaaaacaaagggcaagagtgctgacttcactaacttcgatcctcgtggcctccttcctgaatccctggattactggacctacccaggctcactgaccacccctcctcttctggaatgtgtgacctggattgtgctcaaggaacccatcagcgtcagcagcgagcaggtgttgaaattccataaacttaacttcaatggggagggtgaacccgaagaactgatggtggacaactggcgcccagctcagccactgaagaacaggcaaatcaaagcttccttcaaa

SEQ ID NO: 5819 - protein, 259 aa, Artificial Sequence
  source: /note="Description of Artificial Sequence: Synthetic Destabilizing Domain (DD)"
SHHWGYGKHNGPEHWHKDFPIAKGERQSPVDIDTHTAKYDPSLKPLSVSYDQATSLRILNNGHAFNVEIDDSQDKAVLKGGPLDGTYRLIQFHFHWGSLDGQGSEHTVDKKKYAAELHLVHWNTKYGDFGKAVQQPDGLAVLGIVLKVGSAKPGLQKVVDVLDSIKTKGKSADFTNFDPRGLLPESLDYWTYPGSLTTPPLLECVTWIVLKEPISVSSEQVLKFRKLNFNGEGEPEELMVDNWRPAQPLKNRQIKASFK

SEQ ID NO: 5820 - DNA, 777 bp, Artificial Sequence
  source: /note="Description of Artificial Sequence: Synthetic Destabilizing Domain (DD)"
tcccatcactgggggtacggcaaacacaacggacctgagcactggcataaggacttccccattgccaagggagagcgccagtcccctgttgacatcgacactcatacagctaagtatgacccttccctgaagcccctgtctgtttcctatgatcaagcaacttccctgaggatcctcaacaatggtcatgctttcaacgtggagattgatgactctcaggacaaagcggtgctcaagggaggacccctggatggcacttacagattgattcagtttcactttcactggggttcacttgatggacaaggttcagagcatactgtggataaaaagaaatatgctgcagaacttcacttggttcactggaacaccaaatatggggattttgggaaagctgtgcagcaacctgatggactggccgttctaggtattgttttgaaggttggcagcgctaaaccgggccttcagaaagttgttgatgtgctggattccattaaaacaaagggcaagagtgctgacttcactaacttcgatcctcgtggcctccttcctgaatccctggattactggacctacccaggctcactgaccacccctcctcttctggaatgtgtgacctggattgtgctcaaggaacccatcagcgtcagcagcgagcaggtgttgaaattccgtaaacttaacttcaatggggagggtgaacccgaagaactgatggtggacaactggcgcccagctcagccactgaagaacaggcaaatcaaagcttccttcaaa

SEQ ID NO: 5821 - protein, 259 aa, Artificial Sequence
  source: /note="Description of Artificial Sequence: Synthetic Destabilizing Domain (DD)"
SHHWGYGKHNGPEHWHKDFPIAKGELQSPVDIDTHTAKYDPSLKPLSVSYDQATSLRILNNGHAFNVEFDDSQDKAVLKGGPLDGIYRLIQFHFHWGSLDGQGSEHTVDKKKYAAELHLVYWNTKYGDFGKAVQQPDGLAVLGIFLKVGSAKPGLQKVVDVLDSIKTKGKSADFTNFDPRGLLPESLDYWTYPGSLTTPPLLECVTWIVLKEPISVSSEQVLKFRKLNFNGEGEPEELMVDNWRPAQPLKDRQIKASFK

SEQ ID NO: 5822 - DNA, 777 bp, Artificial Sequence
  source: /note="Description of Artificial Sequence: Synthetic Destabilizing Domain (DD)"
tcccatcactgggggtacggcaaacacaacggacctgagcactggcataaggacttccccattgccaagggagagctccagtcccctgttgacatcgacactcatacagccaagtatgacccttccctgaagcccctgtctgtttcctatgatcaagcaacttccctgaggatcctcaacaatggtcatgctttcaacgtggagtttgatgactctcaggacaaagcagtgctcaagggaggacccctggatggcatttacagattgattcagtttcactttcactggggttcacttgatggacaaggttcagagcatactgtggataaaaagaaatatgctgcagaacttcacttggtttactggaacaccaaatatggggattttgggaaagctgtgcagcaacctgatggactggccgttctaggtatttttttgaaggttggcagcgctaaaccgggccttcagaaagttgttgatgtgctggattccattaaaacaaagggcaagagtgctgacttcactaacttcgatcctcgtggcctccttcctgaatccctggattactggacctacccaggctcactgaccacccctcctcttctggaatgtgtgacctggattgtgctcaaggaacccatcagcgtcagcagcgagcaggtgttgaaattccgtaaacttaacttcaatggggagggtgaacccgaagaactgatggtggacaactggcgcccagctcagccactgaaggacaggcaaatcaaagcttccttcaaa

SEQ ID NO: 5823 - protein, 259 aa, Artificial Sequence
  source: /note="Description of Artificial Sequence: Synthetic Destabilizing Domain (DD)"
SHHWGYGKHNGPEHWHKDFPIAKGERQSPVDIDTHTAKYDPSLNPLSVSYDQATSLRILNNGHAFNLEFDDSQDKAVLKGGPLDGTYRLIQFHFHWGSLDGQGSEHTVDKKKYAAELYLVHWNTKYGDFGKAVQQPDGLAVLGIFLKVGSAKPGLQKVVDVLDSIKTRGKSADFTNFEPRGLLPESLDYWTYPGSLTTPPLLECVTWIVLKEPISVSSEQVLKFRKLNFNGEGEPEELMVDNWRPAQPLKNRQIKASFK

SEQ ID NO: 5824 - DNA, 777 bp, Artificial Sequence
  source: /note="Description of Artificial Sequence: Synthetic Destabilizing Domain (DD)"
tcccatcactgggggtacggcaaacacaacggacctgagcactggcataaggacttccccattgccaaaggagagcgccagtcccctgttgacatcgacactcatacagccaagtatgacccttccctgaatcccctgtctgtttcctatgatcaagcaacttccctgaggatcctcaacaatggtcatgctttcaacttggagtttgatgactctcaggacaaagcagtgctcaagggaggacccctggatggcacttacagattgattcagtttcactttcactggggttcacttgatggacaaggttcagagcatactgtggataaaaagaaatatgctgcagaactttacttggttcactggaacaccaaatatggggattttgggaaagctgtgcagcaacctgatggactggccgttctaggtatttttttgaaggttggcagcgctaaaccgggccttcagaaagttgttgatgtgctggattccattaaaacaaggggcaagagtgctgacttcactaacttcgaacctcgtggcctccttcctgaatccctggattactggacctacccaggctcactgaccacccctcctcttctggaatgtgtgacctggattgtgctcaaggaacccatcagcgtcagcagcgagcaggtgttgaaattccgaaaacttaacttcaatggggagggtgaacccgaagaactgatggtggacaactggcgcccagctcagccactgaagaacaggcaaatcaaagcttccttcaaa

SEQ ID NO: 5825 - protein, 259 aa, Artificial Sequence
  source: /note="Description of Artificial Sequence: Synthetic Destabilizing Domain (DD)"
SHHWGYGKHNGPELWHKDFPIAKGERQSPVDIDTHTAKYDPSLKPLSVSYDQVTSLRILNNGHAFNVEFDDSQDKAVLKGGPLDGTYRLIQFHFHWGSLDGQGSEHTVDEKKYAAELHLVHWNTKYGDFGKAVQQPDGLAVLGIFLKVGSAKPGLQKVVDVLDSIKTKGKSADFTNFDPRGLLPESLDYWTYPGSLTTPPLLECVTWIVLKEPISVSSKQVLKIRKLNFNGEGEPEELMVDNWRPAQPLKNRQIKASFK

SEQ ID NO: 5826 - DNA, 777 bp, Artificial Sequence
  source: /note="Description of Artificial Sequence: Synthetic Destabilizing Domain (DD)"
tcccatcactgggggtacggcaaacacaacggacctgagctctggcataaggacttccccattgccaagggagagcgccagtcccctgttgacatcgacactcatacagccaagtatgacccttccctgaagcccctgtctgtttcctatgatcaagtaacttccctgaggatcctcaacaatggtcatgctttcaacgtggagtttgatgactctcaggacaaagcagtgctcaagggaggacccctggatggcacttacagattgattcagtttcactttcactggggttcacttgatggacaaggttcagagcatactgtggatgaaaagaaatatgctgcagaacttcacttggttcactggaacaccaaatatggggattttgggaaagctgtgcagcaacctgatggactggccgttctaggtatttttttgaaggttggcagcgctaaaccgggccttcagaaagttgttgatgtgctggattccattaaaacaaagggcaagagtgctgacttcactaacttcgatcctcgtggcctccttcctgaatccctggattactggacctacccaggctcactgaccacccctcctcttctggaatgtgtgacctggattgtgctcaaggaacccatcagcgtcagcagcaagcaggtgttgaaaatccgtaaacttaacttcaatggggagggtgaacccgaagaactgatggtggacaactggcgcccagctcagccactgaagaacaggcaaatcaaagcttccttcaaa

SEQ ID NO: 5827 - protein, 259 aa, Artificial Sequence
  source: /note="Description of Artificial Sequence: Synthetic Destabilizing Domain (DD)"
SHHWGYGKHNGSEHWHKDFPIAKGERQSPVDIDTHTAKYDPSLKPLSVSYDQATSLRILNNGHAFNVEFDDSQDKAVLKGGALDGTYRLIQFHFHWGSLGGQGSEHTVDNKKYAAELHLVHWNTKYGDFGKAVQQPDGLAVLGIFLKVGSAKPGLQKVVDVLDSIKTKGKSADFTNFDPRGLLPESLDYWTYPGSLTTPPLLECVTWIVLKEPISVSSEQVLKFRKLNINGEGEPEELMVDNWRPAQPLKNRQIKASFK

SEQ ID NO: 5828 - DNA, 777 bp, Artificial Sequence
  source: /note="Description of Artificial Sequence: Synthetic Destabilizing Domain (DD)"
tcccatcactgggggtacggcaaacacaacggatctgagcactggcataaggacttccccattgccaagggagagcgccagtcccctgttgacatcgacactcatacagccaagtatgacccttccctgaagcccctgtctgtttcatatgatcaagcaacttccctgaggatcctcaacaatggtcatgctttcaacgtggagtttgatgactctcaggacaaagcagtgctcaagggaggagccctggatggcacttacagattgattcagtttcactttcactggggttcacttggtggacaaggttcagagcatactgtggataacaagaaatatgctgcagaacttcacttggttcactggaacaccaaatatggggattttgggaaagctgtgcagcaacctgatggactggccgttctaggtatttttttgaaggttggcagcgctaaaccgggccttcagaaagttgttgatgtgctggattccattaaaacaaagggcaagagtgctgacttcactaacttcgatcctcgtggcctccttcctgaatccctggattactggacctacccaggctcactgaccacccctcctcttctggaatgtgtgacctggattgtgctcaaggaacccatcagcgtcagcagcgagcaggtgttgaaattccgtaaacttaacatcaatggggagggtgaacccgaagaattgatggtggacaactggcgcccagctcagccactgaagaacaggcaaatcaaagcttccttcaaa

SEQ ID NO: 5829 - protein, 259 aa, Artificial Sequence
  source: /note="Description of Artificial Sequence: Synthetic Destabilizing Domain (DD)"
SHHWGYGKHNGPEHWHKDFPIAKGERQSPVDIDTHTAKYDPSLKPRSVSYDQATSLRILNNGHAFNVEFDDSQDKAVLKGGPLDGTYRLIQFHFHWGSLDGQGSEHTVDKKKYAAELHLVHWNTKYGDFGKAVQQPDGLAVLGIFLKVGSAKPGLQKVVDVLDSIKTKGKSADFTNFDPRGLLPESLDYWTYPGSLTTPPLLECVTWIVLKEPISVSSEQVLKFRKLNFNGEGEPEELMVDNWRPAQPLKNRQIKASFK

SEQ ID NO: 5830 - DNA, 777 bp, Artificial Sequence
  source: /note="Description of Artificial Sequence: Synthetic Destabilizing Domain (DD)"
tcccatcactgggggtacggcaaacacaacggacctgagcactggcataaggacttccccattgccaagggagagcgccagtcccctgttgacatcgacactcatacagccaagtatgacccttccctgaagccccggtctgtttcctatgatcaagcaacttccctgaggatcctcaacaatggtcatgctttcaacgtggagtttgatgactctcaggacaaagcagtgctcaagggaggacccctggatggcacttacagattgattcagtttcactttcactggggttcacttgatggacaaggttcagagcatactgtggataaaaagaaatatgctgcagaacttcacttggttcactggaacaccaaatatggggattttgggaaagctgtgcagcaacctgatggactggccgttctaggtatttttttgaaggttggcagcgctaaaccgggccttcagaaagttgttgatgtgctggattccattaaaacaaagggcaagagtgctgacttcactaacttcgatcctcgtggcctccttcctgaatccctggattactggacctacccaggctcactgaccacccctcctcttctggaatgtgtgacctggattgtgctcaaggaacccatcagcgtcagcagcgagcaggtgttgaaattccgtaaacttaacttcaatggggagggtgaacccgaagaactgatggtggacaactggcgcccagctcagccactgaagaacaggcaaatcaaagcttccttcaaa

SEQ ID NO: 5831 - protein, 259 aa, Artificial Sequence
  source: /note="Description of Artificial Sequence: Synthetic Destabilizing Domain (DD)"
SHHWGYGKHNGPEHWHKDFPIAKGERQSPVDIDTHTAKYDPSLKPLSVSYDQATSLRILNNDHAFNVEFDDSQDKAVLKGGPLDGTYRLIQFHFHWGSLDGQGSEHTVDKKKYAAELHLVHRNTKYGDFGKAVQQPDGLAVLGIFLKVGSAKPGLQKVVDVLDSIKTKGKSADFTNFDPRGLLPESLDYWTYPGSLTTPPLLECVTWIVLKEPISVSSKQVLKFRKLNFNGEGEPEELMVDNWRPAQPLKNRQIKASFK

SEQ ID NO: 5832 - DNA, 777 bp, Artificial Sequence
  source: /note="Description of Artificial Sequence: Synthetic Destabilizing Domain (DD)"
tcccatcactgggggtacggcaaacacaacggacctgagcactggcataaggacttccccattgccaagggagagcgccagtcccctgttgatatcgacactcatacagccaagtatgacccttccctgaagcccctgtctgtttcctatgatcaagcaacttccctgaggatcctcaacaatgatcatgctttcaacgtggagtttgatgactctcaggacaaagcagtactcaagggaggacccctggatggcacttacagattgattcagtttcactttcactggggttcacttgatggacaaggttcagagcatactgtggataaaaagaaatatgctgcagaacttcacttggttcaccggaacaccaaatatggggattttgggaaagctgtgcagcaacctgatggactggccgttctaggtatttttttgaaggttggcagcgctaaaccgggccttcagaaagttgttgatgtgctggattccattaaaacaaagggcaagagtgctgacttcactaacttcgatcctcgtggcctccttcctgaatccctggattactggacctacccaggctcactgaccacccctcctcttctggaatgtgtgacctggattgtgctcaaggaacccatcagcgtcagcagcaagcaggtgttgaaattccgtaaacttaacttcaatggggagggtgaacccgaagaactgatggtggacaactggcgcccagctcagccactgaagaacaggcaaatcaaagcttccttcaaa

SEQ ID NO: 5833 - protein, 259 aa, Artificial Sequence
  source: /note="Description of Artificial Sequence: Synthetic Destabilizing Domain (DD)"
SHHWGYGKHDGPEHWHKDFPIAKGERQSPVDIDTHTAKYDPSLKPLSVSYDQATSLRILNNGHAFNVKFDDSQDKAVLKGGPLDDTYRLIQFHFHWGSLDGQGSEHTMDKKIYAAELHLVHWNIKYGDFGKAVQQPGGLAVLGIFLKVGSAKPSLQKVVDVLDSIKTKGKSADFTNFDPRGLLPESLDYWTYPGSLTTPPLLECVTWIVLKEPISVSSEQVLKFRKLNFNGEGEPEELMVDNWRPAQPLKNRQIKASFK

SEQ ID NO: 5834 - DNA, 777 bp, Artificial Sequence
  source: /note="Description of Artificial Sequence: Synthetic Destabilizing Domain (DD)"
tcccatcactgggggtacggcaaacacgacggacctgagcactggcataaggacttccccattgccaagggagaacgccagtcccctgttgacatcgacactcatacagccaagtatgacccttccctgaagcccctgtctgtttcctatgatcaagcaacttccctgaggatcctcaacaatggtcatgctttcaacgtgaagtttgatgactctcaggacaaagcagtgctcaagggaggacccctggatgacacttacagattgattcagtttcactttcactggggttcacttgatggacaaggttcagagcatactatggataaaaagatatatgctgcagaacttcacttggttcactggaacatcaaatatggggattttgggaaagctgtgcagcaacctggtggactggccgttctaggtatttttttgaaggttggcagcgctaaaccgagccttcagaaagttgttgatgtgctggattccattaaaacaaagggcaagagtgctgacttcactaacttcgatcctcgtggcctccttcctgaatccctggattactggacctacccaggctcactgaccacccctcctcttctggaatgtgtgacctggattgtgctcaaggaacccatcagcgtcagcagcgagcaggtgttgaaattccgtaaacttaacttcaatggggagggtgaacccgaagaactgatggtggacaactggcgcccagctcagccactgaagaacaggcaaatcaaagcttccttcaaa

SEQ ID NO: 5835 - protein, 259 aa, Artificial Sequence
  source: /note="Description of Artificial Sequence: Synthetic Destabilizing Domain (DD)"
SHHWGYGKHNGPEHWHKDFPIAKGERQSPVDIDTHTAKYDPSLKPLSVSYDQATSLRNLNNGHAFNVEFDDSQDKAVLKGGPLDGTYRLIQFHFHWGSLDRQGSEHTVDKKKYAAELHLVHWNTKYGDFGKAVQQPDGLAVLGIFLKVGSAKPGLQKVVDVLDSIKTKGKSTDFTNFDPRGLLPESLDYWTYPGSLTTPPLLECVTWIVLKEPISVSSEQVLKFRKLNFNGEGEPEELMVDNWRPAQPLKNRQIKASFK

SEQ ID NO: 5836 - DNA, 777 bp, Artificial Sequence
  source: /note="Description of Artificial Sequence: Synthetic Destabilizing Domain (DD)"
tcccatcactgggggtacggcaaacacaacggacctgagcactggcataaggacttccccattgccaagggagagcgccagtcccctgttgacatcgacactcatacagccaagtatgacccatccctgaagcccctgtctgtttcctacgatcaagcaacttccctgaggaacctcaacaatggtcatgctttcaacgtggagtttgatgactctcaggacaaagcagtgctcaagggaggacccctggatggcacttacagattgattcagtttcactttcactggggttcacttgatagacaaggttcagagcatactgtggataaaaagaaatatgctgcagaacttcacttggttcactggaacaccaaatatggggattttgggaaagctgtgcagcaacctgatggactggccgttctaggtatttttttgaaggttggcagcgctaaaccgggccttcagaaagttgttgatgtgctggattccattaaaacaaagggcaagagtactgacttcactaacttcgatcctcgtggcctccttcctgaatccctggattactggacctacccaggctcactgaccacccctcctcttctggaatgtgtgacctggattgtgctcaaggaacccatcagcgtcagcagcgagcaggtgttgaaattccgtaaacttaacttcaatggggagggtgaacccgaagaactgatggtggacaactggcgcccagctcagccactgaagaacaggcaaatcaaagcttccttcaaa

SEQ ID NO: 5837 - protein, 259 aa, Artificial Sequence
  source: /note="Description of Artificial Sequence: Synthetic Destabilizing Domain (DD)"
SHHWGYGKHNGPEHWHKDFPIAKGERQSPVDIDTHTAKYDPSLKPLSVSYDQATSLRILNNGHAFNVEFDDSQDKAVFKGGPLDGTYRLIQFHFHWGSLDGQGSEHTVDKKKYAAELHLVHWNTKYGDFGKAVQQPDGLAVLGIFLKVGSAKPGLQKVVDVLDSIKTKGKSADFTNFDSRGLLPESLDYWTYPGSLTTPPLLECVTWIVLKEPISVSSEQVLKFRKLNFNGEGEPEELMVDNWRPAQPLKNRQIKASFK

SEQ ID NO: 5838 - DNA, 777 bp, Artificial Sequence
  source: /note="Description of Artificial Sequence: Synthetic Destabilizing Domain (DD)"
tcccatcactgggggtacggcaaacacaacggacctgagcactggcataaggatttccccattgccaagggagagcgccagtcccctgttgacatcgacactcatacagccaagtatgacccttccctgaagcccctgtctgtttcctatgatcaagcaacttccctgaggatcctcaacaatggtcatgctttcaacgtggagtttgatgactctcaggacaaagcagtgttcaagggaggacccctggatggcacttacagattgattcagtttcactttcactggggttcacttgatggacaaggttcagagcatactgtggataaaaagaaatatgctgcagaacttcacttggttcactggaacaccaaatatggggattttgggaaagctgtgcagcaacctgatggactggccgttctaggtatttttttgaaggttggcagcgctaaaccgggccttcagaaagttgttgatgtgctggattccattaaaacaaagggcaagagtgctgacttcactaacttcgattctcgtggcctccttcctgaatccctggattactggacctacccaggctcactgaccacccctcctcttctggaatgtgtgacctggattgtgctcaaggaacccatcagcgtcagcagcgagcaggtgttgaaattccgtaaacttaacttcaatggggagggtgaacccgaagaactgatggtggacaactggcgcccagctcagccactgaagaacaggcaaatcaaagcttccttcaaa

SEQ ID NO: 5839 - protein, 259 aa, Artificial Sequence
  source: /note="Description of Artificial Sequence: Synthetic Destabilizing Domain (DD)"
SHHWGYGKHNGPEHWHKDFPIAKGERQSPVDIDTHTAKYDPSLKPLSVSYDQATSLRILNNGHAFNVEFDDFQDKAVLKGGPLDGTYRLIQFHFHWGSLDGQGSEHTVDKKKYAAELHLVHWNTKYGDFGKAVQQPDGLAVLGIFLKVGSAKPGLQKVVDVLDSIKTKGKSADFTNFDPRGLLPESLDYWTYPGSLTTPPLLECVTWIVLKEPISVSSEQVLKFRKLNFNGEGEPEELMVDNWRPAQPLKNRQIKASFK

SEQ ID NO: 5840 - DNA, 777 bp, Artificial Sequence
  source: /note="Description of Artificial Sequence: Synthetic Destabilizing Domain (DD)"
tcccatcactgggggtacggcaaacacaacggacctgagcactggcataaggacttccccattgccaagggagagcgccagtcccctgttgacatcgacactcatacagccaagtatgacccttccctgaagcccctgtctgtttcctatgatcaagcaacttccctgaggatcctcaacaatggtcatgctttcaacgtggagtttgatgactttcaggacaaagcagtgctcaagggaggacccctggatggcacttacagattgattcagtttcactttcactggggttcacttgatggacaaggttcagagcatactgtggataaaaagaaatatgctgcagaacttcacttggttcactggaacaccaaatatggggattttgggaaagctgtgcagcaacctgatggactggccgttctaggtatttttttgaaggttggcagcgctaaaccgggccttcagaaagttgttgatgtgctggattccattaaaacaaagggcaagagtgctgacttcactaacttcgatcctcgtggcctccttcctgaatccctggattactggacctacccaggctcactgaccacccctcctcttctggaatgtgtgacctggattgtgctcaaggaacccatcagcgtcagcagcgagcaggtgttgaaattccgtaaacttaacttcaatggggagggtgaacccgaagaactgatggtggacaactggcgcccagctcagccactgaagaacaggcaaatcaaagcttccttcaaa

SEQ ID NO: 5841 - protein, 259 aa, Artificial Sequence
  source: /note="Description of Artificial Sequence: Synthetic Destabilizing Domain (DD)"
SHHWGYGKHNRPEHWHKDFPIAKGERQSPVDIDTHTAKYDPSLKPLSVSYDQATSLRILNNGHAFNVEFDDSQDKAVLKGGPLDGTYRLIQFHFHWGSLDGQGSEHTVDKKKYAAELHLVHWNTKYGDFGKAVQQPDGLAVLGIFLKVGSAKPGLQKVVDVLDSIKTKGKSADFTNFDPRGLLPESLDYWTYPGSLTTPPLLECVTWIVLKEPISVSSEQVLKFRKLNFNGEGEPEELMVDNWRPAQPLKNRQIKASFK

SEQ ID NO: 5842 - DNA, 777 bp, Artificial Sequence
  source: /note="Description of Artificial Sequence: Synthetic Destabilizing Domain (DD)"
tcccatcactgggggtacggcaaacacaacagacctgagcactggcataaggacttccccattgccaagggagagcgccagtcccctgttgacatcgacactcatacagccaagtatgacccttccctgaagcccctgtctgtttcctatgatcaagcaacttccctgaggatcctcaacaatggtcatgctttcaacgtggagtttgatgactctcaggacaaagcagtgctcaagggaggacccctggatggcacttacagattgattcagtttcactttcactggggttcacttgatggacaaggttcagagcatactgtggataaaaagaaatatgctgcagaacttcacttggttcactggaacaccaaatatggggattttgggaaagctgtgcagcaacctgatggactggccgttctaggtatttttttgaaggttggcagcgctaaaccgggccttcagaaagttgttgatgtgctggattccattaaaacaaagggcaagagtgctgacttcactaacttcgatcctcgtggcctccttcctgaatccctggattactggacctacccaggctcactgaccacccctcctcttctggaatgtgtgacctggattgtgctcaaggaacccatcagcgtcagcagcgagcaggtgttgaaattccgtaaacttaacttcaatggggagggtgaacccgaagaactgatggtggacaactggcgcccagctcagccactgaagaacaggcaaatcaaagcttccttcaaa

SEQ ID NO: 5843 - protein, 259 aa, Artificial Sequence
  source: /note="Description of Artificial Sequence: Synthetic Destabilizing Domain (DD)"
SHHWGYGKHNGPEHWHKDFPIAKGERQSPVDIDTHTAKYDPSLKPLSVSYDQATSLRILNNGHAFNVEFDDSQDKPVLKGGPLDGTYRLIQFHFHWGSLDRQGSEHTVDKKKYAAELHLVHWNTKYGDFGKAVQQPNGLAVLGIFLKVGSAKPGLQKVVDVLDSIKTKGKSADFTNFDPRGLLPESLDYWTYPGSLTTPPLLECVTWIVLKEPISVSSEQVLKFRKLNFNGEGEPEELMVDNWRPAQPLKNRQIKASFK

SEQ ID NO: 5844 - DNA, 777 bp, Artificial Sequence
  source: /note="Description of Artificial Sequence: Synthetic Destabilizing Domain (DD)"
tcccatcactgggggtacggcaaacacaacggacctgagcactggcataaggacttccccattgccaagggagagcgccagtcccctgttgacatcgacactcatacagccaagtatgacccttccctgaagcccctttctgtttcctatgatcaagcaacttccctgaggatcctcaacaatggtcatgctttcaacgtggagtttgatgactctcaggacaaaccagtgctcaagggaggacccctggatggcacttacagattgattcagtttcactttcactggggttcacttgatcgacaaggttcagagcatactgtggataaaaagaaatatgctgcagaacttcacttggttcactggaacaccaaatatggggattttgggaaagctgtgcagcaacctaatggactggccgttctaggtatttttttgaaggttggcagcgctaaaccgggccttcagaaagttgttgatgtgctggattccattaaaacaaagggcaagagtgctgacttcactaacttcgatcctcgtgggctccttcctgaatccctggattactggacctacccaggctcactgaccacccctcctcttctggaatgtgtgacctggattgtgctcaaggaacccatcagcgtcagcagcgagcaggtgttgaaattccgtaaacttaacttcaatggggagggtgaacccgaagaactgatggtggacaactggcgcccagctcagccactgaagaacaggcaaatcaaagcttccttcaaa

SEQ ID NO: 5845 - protein, 259 aa, Artificial Sequence
  source: /note="Description of Artificial Sequence: Synthetic Destabilizing Domain (DD)"
SHHWGYGKHNGPEHWHKDLPIAKGERQSPVDIDTHTAKYDPSLNPLSVSYDQATSLRILNNDHAFNVVFDDSQDKAVLKGGPLDGTYRLIQFHFHWGSLDGQGSEHTVDKKKYAAELHLVHWNTKYGDFGKAVQQPDGLAVLGIFLKVGSAKPGLQKVVDVLDSIKTKGKSADFTNFDPRGLLPESLDYWTYPGSLTTPPLLECVTWIVLKEPISVSSEQVLKFRKLNFIGEGEPEELMVDNWRPAQPLKNRQIKASFK

SEQ ID NO: 5846 - DNA, 777 bp, Artificial Sequence
  source: /note="Description of Artificial Sequence: Synthetic Destabilizing Domain (DD)"
tcccatcactgggggtacggcaaacacaacggacctgagcactggcataaggacctccccattgccaagggagagcgccagtcccctgttgacatcgacactcatacagccaagtatgacccttccctgaatcccctgtctgtttcctatgatcaagcaacttccctgaggatcctcaacaatgatcatgctttcaacgtggtgtttgatgactctcaggacaaagcagtgctcaagggaggacccctggatggcacttacagattgattcagtttcactttcactggggttcacttgatggacaaggttcagagcatactgtggataaaaagaaatatgctgcagaacttcacttggttcactggaacaccaaatatggggattttgggaaagctgtacagcaacctgatggactggccgttctaggtatttttttgaaggttggcagcgctaaaccgggccttcagaaagttgttgatgtgctggattccattaaaacaaagggcaagagtgctgacttcactaacttcgatcctcgtggcctccttcctgaatccctggattactggacctacccaggctcactgaccacccctcctcttctggaatgtgtgacctggattgtgctcaaggaacccatcagcgtcagcagcgagcaggtgttgaaattccgtaaacttaacttcattggggagggtgaacccgaagaactgatggtggacaactggcgcccagctcagccactgaagaacaggcaaatcaaagcttccttcaaa

SEQ ID NO: 5847 - protein, 259 aa, Artificial Sequence
  source: /note="Description of Artificial Sequence: Synthetic Destabilizing Domain (DD)"
SHHWGYGKHNGPEHWHKDFPIAKGERQSPVDIDTHTAKYDPSLKPLSVSYDQATSLRILNNGHAFNVEFDDSQDKAVLKGGPLDGTYRLIQFHFHWGSLDGQGSEHTVDKKKYAAELHLVHWNTKYGDFGKAVQQPDGLAVLGIFLKVGSAKPGLQKVVDVLDSIKTKGKSADFTNFDPRGLLPESLDYWTYPGSLTNPPPLECVTWIVLKEPISVSSEQVLKFRKFNFNGEGEPEELMVDNWRPAQPLKNRQIKASFK

SEQ ID NO: 5848 - DNA, 777 bp, Artificial Sequence
  source: /note="Description of Artificial Sequence: Synthetic Destabilizing Domain (DD)"
tcccatcactgggggtacggaaaacacaacggacctgagcactggcataaggacttccccattgccaagggagagcgccagtcccctgttgacatcgacactcatacagccaagtatgacccttccctgaagcccctgtctgtttcctatgatcaagcaacttccctgaggatcctcaacaatggtcatgctttcaacgtggagtttgatgactctcaggacaaagcagtgctcaagggaggacccctggatggcacttacagattgattcagtttcactttcactggggttcacttgatggacaaggttcagagcatactgtggataaaaagaaatatgctgcagaacttcacttggttcactggaacaccaaatatggggattttgggaaagctgtgcagcaacctgatggactggccgttctaggtatttttttgaaggttggcagcgctaaaccgggccttcagaaagttgttgatgtgctggattccattaaaacaaagggcaagagtgctgacttcactaacttcgatcctcgtggcctccttcctgaatccctggattactggacctacccaggctcactgaccaaccctcctcctctggaatgtgtgacctggattgtgctcaaggaacccatcagcgtcagcagcgagcaggtgttgaaattccgtaaatttaacttcaatggggagggtgaacccgaagaactgatggtggacaactggcgcccagctcagccactgaagaacaggcaaatcaaagcttccttcaaa

SEQ ID NO: 5849 - protein, 259 aa, Artificial Sequence
  source: /note="Description of Artificial Sequence: Synthetic Destabilizing Domain (DD)"
SHHWGYGNHNGPEHWHKDFPIAKGERQSPVDIDTHTAKYDPSLKPLSVSYDQATSLRILNNGHAFNVEFDDSQDKAVLKGGPLDGTYRLIQFHFHWGSLDGQGSEHTVDKKKYAAELHLVYWNTKYGDFGKAVQQPDGLAVLGIFLKVGSAKPGLQKVVDVLDSIKKKGKSADFTNFDPRGLLPESLDYWTYPGSLTTPPLLECVTWIVLKEPISVSSEQVLKFRKLNFNGEGEPEELMVDNWRPAQPLKNRQIKASFK

SEQ ID NO: 5850 - DNA, 777 bp, Artificial Sequence
  source: /note="Description of Artificial Sequence: Synthetic Destabilizing Domain (DD)"
tcccatcactgggggtacggcaatcacaacggacctgagcactggcataaggacttccccattgccaagggagagcgccagtcccctgttgacatcgacactcatacagccaagtatgacccttccctgaagcccctgtctgtttcctatgatcaagcaacttccctgaggatcctcaacaatggtcatgctttcaacgtggagtttgatgactctcaggacaaagcagtgctcaagggaggacccctggatggcacttacagattgattcagtttcactttcactggggttcacttgatggacaaggttcagagcatactgtggataaaaagaaatatgctgcagaacttcacttggtttactggaacaccaaatatggggattttgggaaagctgtgcagcaacctgatggactggccgttctaggtatttttttgaaggttggcagcgctaaaccgggccttcagaaagttgttgatgtgctggattccattaaaaaaaagggcaagagtgctgacttcacgaacttcgatcctcgtggcctccttcctgaatccctggattactggacctacccaggctcactgaccacccctcctcttctggaatgtgtgacctggattgtgctcaaggaacccatcagcgtcagcagcgagcaggtgttgaaattccgtaaacttaacttcaatggggagggtgaacccgaagaactgatggtggacaactggcgcccagctcagccactgaagaacaggcaaatcaaagcttccttcaaa

SEQ ID NO: 5851 - protein, 259 aa, Artificial Sequence
  source: /note="Description of Artificial Sequence: Synthetic Destabilizing Domain (DD)"
SHHWGYGKHNGPEHWHKDFPIAKGERQSPVDIDTHTAKYDPSLKPLSVSYDHATSLRILNNGHAFNVEFDDSQDKAVLKGGPLDGTYRVIHFHFHWGSLDGQGSEHTVDKKKYAAELHLVHWNTKYGDFEKAVQQPDGLAVLGIFLKVGSAKPGLQKVVDVLDSIKTKGKSADFTNFDPRGLLPESLDYWTYPGSLTTPPLLECVTWIVLKEPISVSSEQVLKFRKLNFNGEGEPEELMVDNWRPAQPLKNRQIKASFK

SEQ ID NO: 5852 - DNA, 777 bp, Artificial Sequence
  source: /note="Description of Artificial Sequence: Synthetic Destabilizing Domain (DD)"
tcccatcactgggggtacggcaaacacaacggacctgagcactggcataaggacttccccattgccaagggagagcgccagtcccctgttgacatcgacactcatacagccaagtatgacccttccctgaagcccctgtctgtttcctatgatcatgcaacttccctgaggatcctcaacaatggtcatgctttcaacgtggagtttgatgactctcaggacaaagcagtgctcaagggaggacccctggatggcacttacagagtgattcactttcactttcactggggttcacttgatggacaaggttcagagcatactgtggataaaaagaaatatgctgcagaacttcacttggttcactggaacaccaaatatggggattttgagaaagctgtgcagcaacctgatggactggccgttctaggtatttttttgaaggttggcagcgctaaaccgggccttcagaaagttgttgatgtgctggattccattaaaacaaagggcaagagtgctgacttcactaacttcgatcctcgtggcctccttcctgaatccctggattactggacctacccaggctcactgaccacccctcctcttctggaatgtgtgacctggattgtgctcaaggaacccatcagcgtcagcagcgagcaggtgttgaaattccgtaaacttaacttcaatggggagggtgaacccgaagaactgatggtggacaactggcgcccagctcagccactgaagaacaggcaaatcaaagcttccttcaaa

SEQ ID NO: 5853 - protein, 259 aa, Artificial Sequence
  source: /note="Description of Artificial Sequence: Synthetic Destabilizing Domain (DD)"
SHHWGYGKHNGPEHWHKDFPIAKGERQSPVDIDTHTAKYDPSMKPVSVSYDQATSLRILNKGHAFNVDFDDSQDKAVLKGGPLDGTYRLIQFHFHWGSLDGQGSEHTVDKKKYAAELHLVHWNTKYGDFGKAVQQPDGLAVLGIFLKVGSAKPGLQKVVDVLDSIKTKGKSADFTNFDPRGLLPESLDYWTYPGSLTTPPLLECVTWIVLKEPISVSSEQVLKFRKLNFNGEGEPEELMVDNWRPAQPLKNRQIKASFK

SEQ ID NO: 5854 - DNA, 777 bp, Artificial Sequence
  source: /note="Description of Artificial Sequence: Synthetic Destabilizing Domain (DD)"
tcccatcactgggggtacggcaaacacaacggacctgagcactggcataaggacttccccattgccaagggagagcgccagtcccctgttgacatcgatactcatacagccaagtatgacccttccatgaagcccgtgtctgtttcctatgatcaagcaacttccctgaggatcctcaacaaaggtcatgctttcaacgtggattttgatgactctcaggacaaagcagtgctcaagggaggacccctggatggcacttacagattgattcagtttcactttcactggggttcacttgatggacaaggttcagagcatactgtggataaaaagaaatatgctgcagaacttcacttggttcactggaacaccaaatatggggattttgggaaagctgtgcagcaacctgatggactggccgttttaggtatttttttgaaggttggcagcgctaaaccgggccttcagaaagttgttgatgtgctggattccattaaaacaaagggcaagagtgctgacttcactaacttcgatcctcgtggcctccttcctgaatccctggattactggacctacccaggctcactgaccacccctcctcttctggaatgtgtgacctggattgtgctcaaggaacccatcagcgtcagcagcgagcaggtgttgaaattccgtaaacttaacttcaatggggagggtgaacccgaagaactgatggtggacaactggcgcccagctcagccactgaagaacaggcaaatcaaagcttccttcaaa

SEQ ID NO: 5855 - protein, 259 aa, Artificial Sequence
  source: /note="Description of Artificial Sequence: Synthetic Destabilizing Domain (DD)"
SHHWGYGKHNGPEHWHKDLPIAKGERQSPVDIDTHTAKYDPSLNPLSVSYDQATSLRILNNGHAFNVEFDDSQDKAVLKGGPLDGTYRLIQFHFHWGSLDGQRSEHTVDKKKYAVELHLVHWNTKYGDFGKAVQQPDGLAVLGIFLKVGSAKPGLQKVVDVLDSIKTKGKSADFTNFDPRGLLPESLDYWTYPGSLTTPPLLECVTWIVLKEPISVSSEQVLKFRKLNFNGEGEPEELMVDNWRPAQPLKNRQIKASFK

SEQ ID NO: 5856 - DNA, 777 bp, Artificial Sequence
  source: /note="Description of Artificial Sequence: Synthetic Destabilizing Domain (DD)"
tcccatcactgggggtacggcaaacacaacggacctgagcactggcataaggacctccccattgccaagggagagcgccagtcccctgttgacatcgacactcatacagccaagtatgacccttccctgaatcccctgtctgtttcctatgatcaagcaacttccctgaggatcctcaacaatggtcatgctttcaacgtggagtttgatgactctcaggacaaagcagtgctcaagggaggacccctggatggcacttacagattgattcagtttcactttcactggggttcacttgatggacaacgttcagagcatactgtggataaaaagaaatatgctgtagaacttcacttggttcactggaacaccaaatatggggattttgggaaagctgtgcagcaacctgatggactggccgttctaggtatttttttgaaggttggcagcgctaaaccgggccttcagaaagttgttgatgtgctggattccattaaaacaaagggcaagagtgctgacttcactaacttcgatcctcgtggcctccttcctgaatccctggattactggacctacccaggctcactgaccacccctcctcttctggaatgtgtgacctggattgtgctcaaggaacccatcagcgtcagcagcgagcaggtattgaaattccgtaaacttaacttcaatggggagggtgaacccgaagaactgatggtggacaactggcgcccagctcagccactgaagaacaggcaaatcaaagcttccttcaaa

SEQ ID NO: 5857 - protein, 259 aa, Artificial Sequence
  source: /note="Description of Artificial Sequence: Synthetic Destabilizing Domain (DD)"
SHHWGYGKHNGPEHWHKDFPIAKGERQSPVDIDTHTAKYDPSLKPLSVSYDQATSLRILNNGHAFNVEFDDSQVKAVLKGGPLDGTYRLIQFHFHWGSLDGQGSEHTVDKKKYAAELHLVHWNTKYGDFGKAVQQPDGLAVLGIFLKVGSAKPGLQKVVDVLDSIKTNGKSADFTNFDPRGLLPESLDYWTYPGSLTTPPLLECVTWIVLKEPISVSSEQVLKFRKLNFNGEGEPEELMVDNWRPAQPLKNRQIKASLK

SEQ ID NO: 5858 - DNA, 777 bp, Artificial Sequence
  source: /note="Description of Artificial Sequence: Synthetic Destabilizing Domain (DD)"
tcccatcactgggggtacggcaaacacaacggacctgagcactggcataaggacttccccattgccaagggagagcgccagtcccctgttgacatcgacactcatacagccaagtatgacccttccctgaagcccctgtctgtttcctatgatcaagcaacttccctgaggatcctcaacaatggtcatgctttcaacgtggagtttgatgactctcaggtcaaagcagtgctcaagggaggacccttggatggcacttacagattgattcagtttcactttcactggggttcacttgatggacaaggttcagagcatactgtggataaaaagaaatatgctgcagaacttcacttggttcactggaacaccaaatatggggattttgggaaagctgtgcagcaacctgatggactggccgttctaggtatttttttgaaggttggcagcgctaaaccgggccttcagaaagttgttgatgtgctggattccattaaaacaaatggcaagagtgctgacttcactaacttcgatcctcgtggcctccttcctgaatccttggattactggacctacccaggctcactgaccacccctcctcttctggaatgtgtgacctggattgtgctcaaggaacccatcagcgtcagcagcgagcaggtgttgaaattccgtaaacttaacttcaatggggagggtgaacccgaagaactgatggtggacaactggcgcccagctcagccactgaagaacaggcaaatcaaagcttccctcaaa

SEQ ID NO: 5859 - protein, 259 aa, Artificial Sequence
  source: /note="Description of Artificial Sequence: Synthetic Destabilizing Domain (DD)"
SHHWGYGKHNGPEHWHKDFPIAKGERQSPVDIDTHTAKYDPSLKPLSVSYDQATSLRILNNGHAFNVEFDDSQDKAVLKGGPLDGTYRLIQFHFHWGSLDGQGSEHTVDKKKYAAELHLVHWNTKYGDFGKAVQQPDGLAVLGIFLKVGSAKPGLQKVVDVLDSIKTKGKSADFTNFDPRGLLPESLDYWTYPGSLTTPPLLECVSWIVLKEPISVSSEQALKFRKLNFDGEGEPEELMVDNWRPAQPLKNRQIKASFK

SEQ ID NO: 5860 - DNA, 777 bp, Artificial Sequence
  source: /note="Description of Artificial Sequence: Synthetic Destabilizing Domain (DD)"
tcccatcactgggggtacggcaaacacaacggacctgagcattggcataaggacttccccattgccaagggagagcgccagtcccctgttgacatcgacactcatacagccaagtatgacccttccctgaagcccctgtctgtttcctatgatcaagcaacttccctgaggatcctcaacaatggtcatgctttcaacgtggagtttgatgactctcaggacaaagcagtgctcaagggaggacccctggatggcacttacagattgattcagtttcactttcactggggttcacttgatggacaaggttcagagcatactgtggataaaaagaaatatgctgcagaacttcacttggttcactggaacaccaaatatggggattttgggaaagctgtgcagcaacctgatggactggccgttctaggtatttttttgaaggttggcagcgctaaaccgggccttcagaaagttgttgatgtgctggattccattaaaacaaagggcaagagtgctgacttcactaacttcgatcctcgtggcctccttcctgaatccctggattactggacctacccaggctcactgactacccctcctcttctggaatgtgtgtcctggattgtgctcaaggaacccatcagcgtcagcagcgagcaggcgttgaaattccgtaaacttaacttcgatggggagggtgaacccgaagaactgatggtggacaactggcgcccagctcagccactgaagaacaggcaaatcaaagcttccttcaaa

SEQ ID NO: 5861 - protein, 259 aa, Artificial Sequence
  source: /note="Description of Artificial Sequence: Synthetic Destabilizing Domain (DD)"
SHHWGYGKHNGPEHWHKDFPIAKGERQSPVDIDTHTAKYDPSLKPLSVSYDQATSLRFLNNGHAFNVEFDDSQDKAVLKGGPLDGTYRLIQFHFHWGSLDGQGSEHTVDKKKYAAELHLVHWNTKYGDFGKAVQQPDGLAVLGIFLKVGSAKPGLQKVVDVLDSIKTKGKSADFTNFDPRGLLPESLDYWTYPGSLTTPPLLECMTWIVLKEPISVSSEQVLKFRKLNFNREGEPEELMVDNWRPAQPLKNRQIKASFK

SEQ ID NO: 5862 - DNA, 777 bp, Artificial Sequence
  source: /note="Description of Artificial Sequence: Synthetic Destabilizing Domain (DD)"
tcccatcactgggggtacggcaaacacaacggacctgagcactggcataaggacttccccattgccaagggagagcgccagtcccctgttgacatcgacactcatacagccaagtatgacccttccctgaagcccctgtctgtttcctatgatcaagcaacttccctgaggttcctcaacaatggtcatgctttcaacgtggagtttgatgactctcaggacaaagcagtgctcaagggaggacccctggatggcacttacagattgattcagtttcactttcactggggctcacttgatggacaaggttcagagcatactgtggataaaaagaaatatgctgcagaacttcacttggttcactggaacaccaaatatggggattttgggaaagctgtgcagcaacctgatggactggccgttctaggtatttttttgaaggttggcagcgctaaaccgggccttcagaaagttgttgatgtgctggattccattaaaacaaagggcaagagtgctgacttcactaacttcgatcctcgtggcctccttcctgaatccctggattactggacctacccaggctcactgaccacccctcctcttctggaatgtatgacctggattgtgctcaaggaacccatcagcgtcagcagcgagcaggtgttgaaattccgtaaacttaacttcaatagggagggtgaacccgaagaactgatggtggacaactggcgcccagctcagccactgaagaacaggcaaatcaaagcttccttcaaa

SEQ ID NO: 5863 - protein, 259 aa, Artificial Sequence
  source: /note="Description of Artificial Sequence: Synthetic Destabilizing Domain (DD)"
SHHWGYGKHNGAEHWHKDFPIAKGERQSPVDIDTHTAKYDPSLKPLSVSYDQATSLRILNNGHAFNVEFDDSQDKAVLKGGPLDGTYRLIQFHFHWGSLDGQGSEHTVDKKKYAAELHLVHWNTKYGDFGKTVQQPDGLAVLGIFLKVGSAKPGLQKVVDVLDSIKTKGKSADFTNFDPRGLLPESLDYWTYPGSLTTPPLLECVTWIVLKEPISVSSEQVLKFRKLNFNGEGEPEELMVDNWRPAQPLKNRQIKASFK

SEQ ID NO: 5864 - DNA, 777 bp, Artificial Sequence
  source: /note="Description of Artificial Sequence: Synthetic Destabilizing Domain (DD)"
tcccatcactgggggtacggcaaacacaacggagctgagcactggcataaggacttccccattgccaagggagagcgccagtcccctgttgacatcgacactcatacagccaagtatgacccttccctgaagcccctgtctgtttcctatgatcaagcaacttccctgaggatcctcaacaatggtcatgctttcaacgtggagtttgatgactctcaggacaaagcagtgctcaagggaggacccctggatggcacttacagattgattcagtttcactttcactggggttcacttgatggacaaggttcagagcatactgtggataaaaagaaatatgctgcagaacttcacttggttcactggaacaccaaatatggggattttgggaaaactgtgcagcaacctgatggactggccgttctaggtatttttttgaaggttggcagcgctaaaccgggccttcagaaagttgttgatgtgctggattccattaaaacaaagggcaagagtgctgacttcactaacttcgatcctcgtggcctccttcctgaatccctggattactggacctacccaggctcactgaccacccctcctcttctggaatgtgtgacctggattgtgctcaaggaacccatcagcgtcagcagcgagcaggtgttgaaattccgtaaacttaacttcaatggggagggtgaacccgaagaactgatggtggacaactggcgcccagctcagccactgaagaacaggcaaatcaaagcttccttcaaa

SEQ ID NO: 5865 - protein, 259 aa, Artificial Sequence
  source: /note="Description of Artificial Sequence: Synthetic Destabilizing Domain (DD)"
SHHWGYGKHNGPEHWHKDFPIAKGERQSPVDIDTHTAKYDPSLKPLSVSYDQATSLRILRNGHAFNVEFDDSQDKAVLMGGPLDGTYRLIQFHFHWGSLDGQGSEHTVDKKKYAAELHLVHWNTKYGDFGKAVQQPDGLAVLGIFLKVGSAKPGLQKVVDVLDSIKTKGKSADFTNFDPRGLLPESLDYWTYPGSLTTPPLLECVTWIVLNEPISVSSEQVLKFRKLNFTGEGEPEELMVDNWRPAQPPKNRQIKASFK

SEQ ID NO: 5866 - DNA, 777 bp, Artificial Sequence
  source: /note="Description of Artificial Sequence: Synthetic Destabilizing Domain (DD)"
tcccatcactgggggtacggcaaacacaacggacctgagcactggcataaggacttccccattgccaagggagagcgccagtcccctgttgacatcgacactcatacagccaagtatgacccttccctgaagcccctgtctgtttcctatgatcaagcaacttccctgaggatcctcaggaatggtcatgctttcaacgtggagtttgatgactctcaggacaaagcagtgctcatgggaggacccctggatggcacttacagattgattcagtttcactttcactggggttcacttgatggacaaggttcagagcatactgtggataaaaagaaatatgctgcagaacttcacttggttcactggaacaccaaatatggggattttggaaaagctgtgcagcaacctgatggactggccgttctaggtatttttttgaaggttggcagcgctaaaccgggccttcagaaagttgttgatgtgctggattccattaaaacaaagggcaagagtgctgacttcactaacttcgatcctcgtggcctccttcctgaatccctggattactggacctacccaggctcactgaccacccctcctcttctggaatgtgtgacctggattgtgctcaatgaacccatcagcgtcagcagcgagcaggtgttgaaattccgtaaacttaacttcactggggagggtgaacccgaagaactgatggtggacaactggcgcccagctcagccaccgaagaacaggcaaatcaaagcttccttcaaa

SEQ ID NO: 5867 - protein, 259 aa, Artificial Sequence
  source: /note="Description of Artificial Sequence: Synthetic Destabilizing Domain (DD)"
SHHWGYGKHNGPEHWHKDFPIAKGERQSPVDIDTHTAKYDPSLKPLSVSYDQATSLRILNNDHAFNVVFDDSQDKAVLKGGPLDGTYRLIQFHFHWGSLDGQGSEHTVDKKKYAAELHLVHWNTKYGDFGKAVQQPDGLAVLGIFLKVGSAKPGLQKVVDVLDSIKTKGKSADFTNFDPRGLLPESLDYWTYPGSLTTPPLLECVTWIVLKEPISVSSEQVLKFRKLNFIGEGEPEELMVDNWRPAQPLKNRQIKASFK

SEQ ID NO: 5868 - DNA, 777 bp, Artificial Sequence
  source: /note="Description of Artificial Sequence: Synthetic Destabilizing Domain (DD)"
tcccatcactgggggtacggcaaacacaacggacctgagcactggcataaggacttccccattgccaagggagagcgccagtcccctgttgacatcgacactcatacagccaagtatgacccttccctgaagcccctgtctgtttcctatgatcaagcaacttccctgaggatcctcaacaatgatcatgctttcaacgtggtgtttgatgactctcaggacaaagcagtgctcaagggaggacccctggatggcacttacagattgattcagtttcactttcactggggttcacttgatggacaaggttcagagcatactgtggataaaaagaaatatgctgcagaacttcacttggttcactggaacaccaaatatggggattttgggaaagctgtacagcaacctgatggactggccgttctaggtatttttttgaaggttggcagcgctaaaccgggccttcagaaagttgttgatgtgctggattccattaaaacaaagggcaagagtgctgacttcactaacttcgatcctcgtggcctccttcctgaatccctggattactggacctacccaggctcactgaccacccctcctcttctggaatgtgtgacctggattgtgctcaaggaacccatcagcgtcagcagcgagcaggtgttgaaattccgtaaacttaacttcattggggagggtgaacccgaagaactgatggtggacaactggcgcccagctcagccactgaagaacaggcaaatcaaagcttccttcaaa

SEQ ID NO: 5869 - protein, 259 aa, Artificial Sequence
  source: /note="Description of Artificial Sequence: Synthetic Destabilizing Domain (DD)"
SHHWGYGKHNGPEHWHKDFPIAKGERQSPVDIDTHTAKYDPSLKPLSVSYDQATSLRNLNNGHAFNVEFDDSQDKAVLKGGPLDGTYILIQFHFHWGSLDGQGSEHTVDKKKYAAELHLVHWNTKYGDFGKAVQQPDGLAVLGIFLKVGSAKPGLQKVVDVLDSIKTKGKSADFTNFDPRGLLPESLDYWTYPGSLTTPPLLECVTWIVLKEPISVSSEQVLKFRKLNFNGEGEPEELMVDNWRPAQPLKNRQIKASFK

SEQ ID NO: 5870 - DNA, 777 bp, Artificial Sequence
  source: /note="Description of Artificial Sequence: Synthetic Destabilizing Domain (DD)"
tcccatcactgggggtacggcaaacacaacggacctgagcactggcataaggacttccccattgccaagggagagcgccagtcccctgttgacatcgacactcatacagccaagtatgacccttccctgaagcccctgtctgtttcctatgatcaagcaacttccctgaggaacctcaacaatggtcatgctttcaacgtggagtttgatgactctcaggacaaagcagtgctcaagggaggacccctggatggcacttacatattgattcagtttcactttcactggggttcacttgatggacaaggttcagagcatactgtggataaaaagaaatatgctgcagaacttcacttggttcactggaacaccaaatatggggattttgggaaagctgtgcagcaacctgatggactggccgttctaggtatttttttgaaggttggcagcgctaaaccgggccttcagaaagttgttgatgtgctggattccattaaaacaaagggcaagagtgctgacttcactaacttcgatcctcgtggcctccttcctgaatccctggattactggacctacccaggctcactgaccacccctcctcttctggaatgtgtgacctggattgtgctcaaggaacccatcagcgtcagcagcgagcaggtgttgaaattccgtaaacttaacttcaatggggagggtgaacccgaagaactgatggtggacaactggcgcccagctcagccactgaagaacaggcaaatcaaagcttccttcaaa

SEQ ID NO: 5871 - protein, 259 aa, Artificial Sequence
  source: /note="Description of Artificial Sequence: Synthetic Destabilizing Domain (DD)"
SHHWGYGKHNGPEHWHKDFPIAKGERQSPVDIDTHTAKYDPSLKPLSVSYDQATSLRILNNGHNFNVEFDDSQDKAVLKGGPLDDTYRLIQFHFHWGSLDGQGSEHTVDKKKYAAELHLVHWNTKYGDFRKAVQQPDGLAVLGIFLKVGSAKPDLQNVVDALDSIKTKDKSADFTNFDPRGLLPESLDYWTYPGSLTTPPLLECVTWIVLKEPISVSSEQVLKFRKLNFNGEGELEELMVDNWRPAQPLKNRQIKASFK

SEQ ID NO: 5872 - DNA, 777 bp, Artificial Sequence
  source: /note="Description of Artificial Sequence: Synthetic Destabilizing Domain (DD)"
tcccatcactgggggtacggcaaacacaacggacctgagcactggcataaggacttccccattgccaagggagagcgccagtcccctgttgacatcgacactcatacagccaagtatgacccttccctgaagcccctgtctgtttcctatgatcaagcaacttccctgaggatcctcaacaatggtcataatttcaacgtggagtttgatgactctcaggacaaagcagtgctcaagggaggacccctggatgacacttacagattgattcagtttcactttcactggggttcacttgatggacaaggttcagagcatactgtggataaaaagaaatatgctgcagaacttcacttggttcactggaacaccaaatatggggattttaggaaagctgtgcagcaacctgatggactggccgttctaggtatttttttgaaggttggcagcgctaaaccggaccttcagaatgttgttgatgcgctggattccattaaaacaaaggacaagagtgctgacttcactaacttcgatcctcgtggcctccttcctgaatccctggattactggacctacccaggctcactgaccacccctcctcttctggaatgtgtgacctggattgtgctcaaggaacccatcagcgtcagcagcgagcaggtgttgaaattccgtaaacttaacttcaatggggagggtgaactcgaagaactgatggtggacaactggcgcccagctcagccactgaagaacaggcaaatcaaagcttccttcaaa

SEQ ID NO: 5873 - protein, 259 aa, Artificial Sequence
  source: /note="Description of Artificial Sequence: Synthetic Destabilizing Domain (DD)"
SHHWGYGKHNRPEYWHKVFPIAKGERQSPVDIDTHTAKYDPSLKPLSVSYDQATSLRILNNGHAFNVEFDDSQDKAVLKGGPLDGTYRLIQFHFHWGSLDGQGSEHTVDKKKYAAELHLVHWNTKYGDFGKAVQQPDGLAVLGIFLKVGSAKPGLQKVVDVLDSIKTKGKSADFTNFDPRGLLPESLDYWTYPGSLTTPPLLECVTWIVLKEPISVSSEQVLKFRKLNFNGEGEPEELMVDNWRPAQPLKNRQIKASFK

SEQ ID NO: 5874 - DNA, 777 bp, Artificial Sequence
  source: /note="Description of Artificial Sequence: Synthetic Destabilizing Domain (DD)"
tcccatcactgggggtacggcaaacacaaccgacctgagtactggcataaggtcttccccattgccaagggagagcgccagtcccctgttgacatcgacactcatacagccaagtatgacccttccctgaagcccctgtctgtttcctatgatcaagcaacttcactgagaatcctcaacaatggtcatgctttcaacgtggagtttgatgactctcaggacaaagcagtgctcaagggaggacccctggatggcacttacagattgattcagtttcactttcactggggttcacttgatggacaaggttcagagcatactgtggataaaaagaaatatgctgcagaacttcacttggttcactggaacaccaaatatggggattttgggaaagctgtgcagcaacctgatggactggccgttctaggtatttttttgaaggttggcagcgctaaaccgggccttcagaaagttgttgatgtgctggattccattaaaacaaagggcaagagtgctgacttcactaacttcgatcctcgtggcctccttcctgaatccctggattactggacctacccaggctcactgaccacccctcctcttctggaatgtgtgacctggattgtgctcaaggaacccatcagcgtcagcagcgagcaggtgttgaaattccgtaaacttaacttcaatggggagggtgaacccgaagaactgatggtggacaactggcgcccagctcagccactgaagaacaggcaaatcaaagcttccttcaaa

SEQ ID NO: 5875 - protein, 259 aa, Artificial Sequence
  source: /note="Description of Artificial Sequence: Synthetic Destabilizing Domain (DD)"
SHHWGYGKHNGPEHWHKDFPIAKGERQSPVDIDTHTAKYDPSLKPLSVSYDQATSLRILNNGHAFNVEFDDSQDKAVLKGGPLDGTYRLIQFHFHWGSLDGQGSEHTVDKKKYAAELHLVHWNTKYGDFGKAVQQPDGLAVLGIFLKVGSAKPGHQKVVDVLDSIKTKGKCADFTNYDPRGLLPDSLDYWTYPGSLTTPPLLECVTWIVLKEPISVSSEQVLKFRKLNFNGEGEPEELMVDNWRPAQPLKNRQIKASFK

SEQ ID NO: 5876 - DNA, 777 bp, Artificial Sequence
  source: /note="Description of Artificial Sequence: Synthetic Destabilizing Domain (DD)"
tcccatcactgggggtacggcaaacacaacggacctgagcactggcataaggacttccccattgccaagggagagcgccagtcccctgttgacatcgacactcatacagccaagtatgacccttccctgaagcccctgtctgtttcctatgatcaagcaacttccctgaggatcctcaacaatggtcatgctttcaacgtggagtttgatgactctcaggacaaagcagtgctcaagggaggacccctggatggcacttacagattgattcagtttcactttcactggggttcacttgatggacaaggttcagagcatactgtggataaaaagaaatatgctgcagaacttcacttggttcactggaacaccaaatatggggattttgggaaagctgtgcagcaacctgatggactggccgttctaggtatttttttgaaggttggcagcgctaaaccgggccatcagaaagttgttgatgtgctggattccattaaaacaaagggcaagtgtgctgacttcactaactacgatcctcgtggcctccttcctgattccctggattactggacctacccaggctcactgaccacccctcctcttctggaatgtgtgacctggattgtgctcaaggaacccatcagcgtcagcagcgagcaggtgttgaaattccgtaaacttaacttcaatggggagggtgaacccgaagaactgatggtggacaactggcgcccagctcagccactgaagaacaggcaaatcaaagcttccttcaaa

SEQ ID NO: 5877 - protein, 259 aa, Artificial Sequence
  source: /note="Description of Artificial Sequence: Synthetic Destabilizing Domain (DD)"
SHHWGYGKHNGPEHWHKDFPIAKGERQSPVDIDTHTAKYDPSLKPLSVSYDQATSLRILNNGHVFNVEFDDSQDKAVLKGGPLDGTYRLIQFHYHWGSLDGQGSGQTVDKKKYAAELHLVHWNTKYGDFGKAVQQPDGLAVLGMFLKVGSAKPGLQKVVDVLDSIKTKGKSADITNFDPRGLLPESLDYWTYPGSLTTPPLLECVTWIVLKEPISVSSEQVLKFRKLNFNGEGEPEELMVDNWRPAQPLKNRQIKASFK

SEQ ID NO: 5878 - DNA, 777 bp, Artificial Sequence
  source: /note="Description of Artificial Sequence: Synthetic Destabilizing Domain (DD)"
tcccatcactgggggtacggcaaacacaacggacctgagcactggcataaggacttccccattgccaagggagagcgccagtcccctgttgacatcgacactcatacagccaagtatgacccttccctgaagcccctgtctgtttcctatgatcaagcaacttccctgaggatcctcaacaatggtcatgttttcaacgtggagtttgatgactctcaggacaaagcagtgctcaagggaggacccctggatggcacttacagattgattcagtttcactatcactggggttcacttgatggacaaggttcagggcaaactgtggataaaaagaaatatgctgcagaacttcacttggttcactggaacaccaaatatggggattttgggaaagctgtgcagcaacctgatggactggccgttctaggtatgtttttgaaggttggcagcgctaaaccgggccttcagaaagttgttgatgtgctggattccattaaaacaaagggcaagagtgctgacatcactaacttcgatcctcgtggcctccttcctgaatccctggattactggacctacccaggctcactgaccacccctcctcttctggaatgtgtgacctggattgtgctcaaggaacccatcagcgtcagcagcgagcaggtgttgaaattccgtaaacttaacttcaatggagagggtgaacccgaagaactgatggtggacaactggcgcccagctcagccactgaagaacaggcaaatcaaagcttccttcaaa

SEQ ID NO: 5879 - protein, 259 aa, Artificial Sequence
  source: /note="Description of Artificial Sequence: Synthetic Destabilizing Domain (DD)"
SHHWGYGKHNGPEHWHKDFPIAKGERQSPVDIDTHTAKYDPSLKPLSVSYDQATSLRILNNGHAFNVEFDDSQDKAVLKGGPLDGTYRLIQFHFHWGSLDGQGSEHTVDKKKYAAELHLVHWNTKYGDFGKAVQQPDGLAVLGIFLKVGSAKPGLQKVVDVLDSIKTKGKSADFTNFDPRGLLPESLDYWTYPGSPTTPPLLECVTWIVLKEPISVSSEQVLKFRKLNFNGEGEPEELMVDNWRPAQPLKNRQIKASFK

SEQ ID NO: 5880 - DNA, 777 bp, Artificial Sequence
  source: /note="Description of Artificial Sequence: Synthetic Destabilizing Domain (DD)"
tcccatcactgggggtacggcaaacacaacggacctgagcactggcataaggacttccccattgccaagggagagcgtcagtcccctgttgacatcgacactcatacagccaagtatgacccttccctgaagcccctgtctgtttcctatgatcaagcaacttccctgaggatcctcaacaatggtcatgctttcaacgtggagtttgatgactctcaggacaaagcagtgctcaagggaggacccctggatggcacttacagattgattcagtttcactttcactggggttcacttgatggacaaggttcagagcatactgtggataaaaagaaatatgctgcagaacttcacttggttcactggaacaccaaatatggggattttgggaaagctgtgcagcaacctgatggactggccgttctaggtatttttttgaaggttggcagcgctaaaccgggccttcagaaagttgttgatgtgctggattccattaaaacaaagggcaagagtgctgacttcactaacttcgatcctcgtggcctccttcctgaatccctggattactggacctacccaggctcaccgaccacccctcctcttctggaatgtgtgacctggattgtgctcaaggaacccatcagcgtcagcagcgagcaggtgttgaaattccgtaaacttaacttcaatggggagggtgaacccgaagaactgatggtggacaactggcgcccagctcagccactgaagaacaggcaaatcaaagcttccttcaaa

SEQ ID NO: 5881 - protein, 259 aa, Artificial Sequence; identical to SEQ ID NO: 5867
  source: /note="Description of Artificial Sequence: Synthetic Destabilizing Domain (DD)"

SEQ ID NO: 5882 - DNA, 777 bp, Artificial Sequence; identical to SEQ ID NO: 5868
  source: /note="Description of Artificial Sequence: Synthetic Destabilizing Domain (DD)"

SEQ ID NO: 5883 - protein, 141 aa, Artificial Sequence
  source: /note="Description of Artificial Sequence: Synthetic Destabilizing Domain (DD)"
SHHWGYGKHNEPEHWHKDFPIAKGERQSPVDIDTHTVKYDPSLKPLSVSYDQATSLRILNNGHVFNVEFDDSQDKAVLKGGPLDGTYRLIQFHFHWVHLMDKVQSILWIKRNMLQNFTWFTGTPNMGILGELCSNLMDWPF

SEQ ID NO: 5884 - protein, 117 aa, Artificial Sequence
  source: /note="Description of Artificial Sequence: Synthetic Destabilizing Domain (DD)"
VFFLKVGSAKPGQQKVVDALDSIKTKGKSADFTNFDPRGLLPESLDYWTYPGSLTTPPLLECVTWIVLKEPISVSSEQVLKFRKLNFNGEGEPEELMVDNWRPAQPLKNRQIKASFK

SEQ ID NO: 5885 - DNA, 777 bp, Artificial Sequence
  source: /note="Description of Artificial Sequence: Synthetic Destabilizing Domain (DD)"
tcccatcactgggggtacggcaaacacaacgaacctgagcactggcataaggacttccccattgccaagggagagcgccagtcccctgttgacatcgacactcatacagtcaagtatgacccttccctgaagcccctgtctgtttcctatgatcaagcaacttccctgaggatcctcaacaatggtcatgttttcaacgtggagtttgatgactctcaggacaaagcagtgctcaagggaggacccctggatggcacttacagattgattcagtttcactttcactgggttcacttgatggacaaggttcagagcatactgtggataaaaagaaatatgctgcagaatttcacttggttcactggaacaccaaatatggggattttgggagagctgtgcagcaacctgatggactggccgttctaggtattttttttgaaggttggcagcgctaaaccgggccaacagaaagttgttgatgcgctggattccattaaaacaaagggcaagagtgctgacttcactaacttcgatcctcgtggcctccttcctgaatccctggattactggacctacccaggctcactgaccacccctcctcttctggaatgtgtgacctggattgtgctcaaggaacccatcagcgtcagcagcgagcaggtgttgaaattccgtaaacttaacttcaatggggagggtgaacccgaagaactgatggtggacaactggcgcccagctcagccactgaagaacaggcaaatcaaagcttccttcaaa

SEQ ID NO: 5886 - protein, 189 aa, Artificial Sequence
  source: /note="Description of Artificial Sequence: Synthetic Destabilizing Domain (DD)"
SHHWGYGKHNGPEHWHKDLPIAKGERQSPVDIDTHTAKYDPSLNPLSVSYDQATSLRILNNGHAFNVEFDDSQDKAVLKGGPLDGTYRLIQFHFHWGSLDGQRSEHTVDKKKYAVELHLVHWNTKYGDFGKAVQQPDGLAVLGIFLKVGSAKPGLQKVVDVLDSIKTKGKSGDFTNFDPRGLLPESLDY

SEQ ID NO: 5887 - protein, 69 aa, Artificial Sequence
  source: /note="Description of Artificial Sequence: Synthetic Destabilizing Domain (DD)"
TYPGSLTTPPLLECVTWIVLKEPISVSSEQVLKFRKLNFNGEGEPEELMVDNWRPAQPLKNRQIKASFK

SEQ ID NO: 5888 - DNA, 777 bp, Artificial Sequence
  source: /note="Description of Artificial Sequence: Synthetic Destabilizing Domain (DD)"
tcccatcactgggggtacggcaaacacaacggacctgagcactggcataaggacctccccattgccaagggagagcgccagtcccctgttgacatcgacactcatacagccaagtatgacccttccctgaatcccctgtctgtttcctatgatcaagcaacttccctgaggatcctcaacaatggtcatgctttcaacgtggagtttgatgactctcaggacaaagcagtgctcaagggaggacccctggatggcacttacagattgattcagtttcactttcactggggttcacttgatggacaacgttcagagcatactgtggataaaaagaaatatgctgtagaacttcacttggttcactggaacaccaaatatggggattttgggaaagctgtgcagcaacctgatggactggccgttctaggtatttttttgaaggttggcagcgctaaaccgggccttcagaaagttgttgatgtgctggattccattaaaacaaagggcaagagtggtgacttcactaacttcgatcctcgtggcctccttcctgaatccctggattactgaacctacccaggctcactgaccacccctcctcttctggaatgtgtgacctggattgtgctcaaggaacccatcagcgtcagcagcgagcaggtgttgaaattccgtaaacttaacttcaatggggagggtgaacccgaagaactgatggtggacaactggcgcccagctcagccactgaagaacaggcaaatcaaagcttccttcaaa

SEQ ID NO: 5889 - protein, 189 aa, Artificial Sequence
  source: /note="Description of Artificial Sequence: Synthetic Destabilizing Domain (DD)"
SHHWGYGKHNGPEHWDKDFPIAKGERQSSVDIDTHTAKYDPSLKPLSVSYDQATSLRILNNGHAFNVEFDDSQDKAVLKVGPLDGTYRLIQFHFHWGSLDGQGSEHTVDKKKYAAELHLVHWNTKYGDFGRAVQQPDGLAVLGIFLKVGIDKPGLQKVVDVLDSIKTKGKSGDFTNFDPRGLLPESLDY

SEQ ID NO: 5890 - DNA, 777 bp, Artificial Sequence
  source: /note="Description of Artificial Sequence: Synthetic Destabilizing Domain (DD)"
tcccatcactgggggtacggcaaacacaacggacctgagcattgggataaggacttccccattgccaagggagagcgccagtcctctgttgacatcgacactcatacagccaagtatgacccttccctgaagcccctgtctgtttcctatgatcaagcaacttccctgaggatcctcaacaatggtcatgctttcaacgtggagtttgatgactctcaggacaaagcagtgctcaaggtaggacccctggatggcacttacagattgattcagtttcactttcactggggttcacttgatggacaaggttcagagcatactgtggataaaaagaaatatgctgcagaacttcacttggttcactggaacaccaaatatggggattttgggagagctgtgcagcaacctgatggactggccgttctaggtatttttttgaaggttggcatcgataaaccgggccttcagaaagttgttgatgtgctggattccattaaaacaaagggcaagagtggtgacttcactaacttcgatcctcgtggcctccttcctgaatccctggattactgaacctacccaggctcactgaccacccctcctcttctggaatgtgtgacctggattgtgctcaaggaacccatcagcgtcagcagcgagcaggtattgaaattccgtaaacttaacttcaatggggagggtgaacccgaagaactgatggtggacaactggcgcccagctcagccactgaagaacaggcaaatcaaagcttccttcaaa

SEQ ID NO: 5891 - DNA, 777 bp, Artificial Sequence
  source: /note="Description of Artificial Sequence: Synthetic Destabilizing Domain (DD)"
tcccatcactgggggtacggcaaacacaacggacctgagcattgggataaggacttccccattgccaagggagagcgccagtcctctgttgacatcgacactcatacagccaagtatgacccttccctgaagcccctgtctgtttcctatgatcaagcaacttccctgaggatcctcaacaatggtcatgctttcaacgtggagtttgatgactctcaggacaaagcagtgctcaaggtaggacccctggatggcacttacagattgattcagtttcactttcactggggttcacttgatggacaaggttcagagcatactgtggataaaaagaaatatgctgcagaacttcacttggttcactggaacaccaaatatggggattttgggagagctgtgcagcaacctgatggactggccgttctaggtatttttttgaaggttggcatcgataaaccgggccttcagaaagttgttgatgtgctggattccattaaaacaaagggcaagagtggtgacttcactaacttcgatcctcgtggcctccttcctgaatccctggattactgaacctacccaggctcactgaccacccctcctcttctggaatgtgtgacctggattgtgctcaaggaacccatcagcgtcagcagcgagcaggtgttgaaattccgtaaacttaacttcaatggggagggtgaacccgaagaactgatggtggacaactggcgcccagctcagccactgaagaacaggcaaatcaaagcttccttcaaa

SEQ ID NO: 5892 - protein, 88 aa, Artificial Sequence
  source: /note="Description of Artificial Sequence: Synthetic Destabilizing Domain (DD)"
SHHWGYGKHNGPEHWHKDFPIAKGERQSPVDIDTHTAKYDPSLKPLSVSYDQATSLRNLNNGHAFNVEFDDSQDKAVLKGGPLDGTYR

SEQ ID NO: 5893 - protein, 170 aa, Artificial Sequence
  source: /note="Description of Artificial Sequence: Synthetic Destabilizing Domain (DD)"
IQFHFHWGSLDRQGSEHTVDKKKYAAELHLVHWNTKYGDFGKAVQQPDGLAVLGIFLKVGSAKPGLQKVVDVLDSIKTKGKSADFTNFDPRGLLPESLDYWTYPGSLTTPPLLECVTWIVLKEPISVSSEQVLKFRKLNFNGEGEPEELMVDNWRPAQPLKNRQIKASFK

SEQ ID NO: 5894 - DNA, 777 bp, Artificial Sequence
  source: /note="Description of Artificial Sequence: Synthetic Destabilizing Domain (DD)"
tcccatcactgggggtacggcaaacacaacggacctgagcactggcataaggacttccccattgccaagggagagcgccagtcccctgttgacatcgacactcatacagccaagtatgacccatccctgaagcccctgtctgtttcctacgatcaagcaacttccctgaggaacctcaacaatggtcatgctttcaacgtggagtttgatgactctcaggacaaagcagtgctcaagggaggacccctggatggcacttacagatagattcagtttcactttcactggggttcacttgatagacaaggttcagagcatactgtggataaaaagaaatatgctgcagaacttcacttggttcactggaacaccaaatatggggattttgggaaagctgtgcagcaacctgatggactggccgttctaggtatttttttgaaggttggcagcgctaaaccgggccttcagaaagttgttgatgtgctggattccattaaaacaaagggcaagagtgctgacttcactaacttcgatcctcgtggcctccttcctgaatccctggattactggacctacccaggctcactgaccacccctcctcttctggaatgtgtgacctggattgtgctcaaggaacccatcagcgtcagcagcgagcaggtgttgaaattccgtaaacttaacttcaatggggagggtgaacccgaagaactgatggtggacaactggcgcccagctcagccactgaagaacaggcaaatcaaagcttccttcaaa

SEQ ID NO: 5895 - protein, 242 aa, Artificial Sequence
  source: /note="Description of Artificial Sequence: Synthetic Destabilizing Domain (DD)"
SHHWGYGKHNGPEHWHKDFPIAKGERQSPVDIDIHTAKYDPSLKPLSVSYDQATSLRILNNGHAFNVEFDDSQDKAVLKGGPLDGTYRLIQFHFHWGSLDGQGSEHTVDKKKHAAELHLVHWNTKYGDFGKAVQQPDGLAVLGIFLKVGSAKLGLQKVVVVLDSIKTKGKSADFTNFDPRGLLPESLDYWTYPGSLTTAPLLECVTWIVLKEPISVSSERVLKLRKLNFNGDGEPEELMVDN

SEQ ID NO: 5896 - protein, 16 aa, Artificial Sequence
  source: /note="Description of Artificial Sequence: Synthetic Destabilizing Domain (DD)"
RPAQPLKNRQIKASFK

SEQ ID NO: 5897 - DNA, 777 bp, Artificial Sequence
  source: /note="Description of Artificial Sequence: Synthetic Destabilizing Domain (DD)"
tcccatcactgggggtacggcaaacacaacggacctgagcactggcataaggacttccccattgccaagggagagcgccagtcccctgttgacatcgacattcatacagccaagtatgacccttccctgaagcccctgtctgtttcctatgatcaagcaacttccctgaggatcctcaacaatggtcatgctttcaacgtggagtttgatgactctcaggataaagcagtgctcaagggaggacccctggatggcacttacagattgattcagtttcactttcactggggttcacttgatggacaaggttcagagcatactgtggataaaaagaaacatgctgcagaacttcacttggttcactggaacaccaaatatggggattttgggaaagctgtgcagcaacctgatggactggccgttctaggtatttttttgaaggttggcagcgctaaactgggccttcagaaagttgttgttgtgctggattccattaaaacaaagggcaagagtgctgacttcactaacttcgatcctcgtggcctccttcctgaatccctggattactggacctacccaggctcactgaccaccgctcctcttctggaatgtgtgacctggattgtgctcaaggaacccatcagcgtcagcagcgagcgggtgttgaaattacgtaaacttaacttcaatggggacggtgaacccgaagaactgatggtggacaactgacgcccagctcagccactgaagaacaggcaaatcaaagcttccttcaaa

SEQ ID NO: 5898 - protein, 188 aa, Artificial Sequence
  source: /note="Description of Artificial Sequence: Synthetic Destabilizing Domain (DD)"
SHHWGYGKHNGPEHWHKDFPIAKGERQSPVDIDTHTAKYDPSLKPLSVSYDQATSLRILNNGHAFNVEFDDSQDKAVLKGGPLDGTYRLIQFHFHWGSLDGQGLEHTVDKKKYAAELHLVHWNTKYGDFGKAVQQPDGVAVLGIFLKVGSAKPCLQKVVDVLDSIKTKGKSADFTNFDPRGLLPESLD

SEQ ID NO: 5899 - protein, 70 aa, Artificial Sequence
  source: /note="Description of Artificial Sequence: Synthetic Destabilizing Domain (DD)"
WTYPGSLTTPPLLECVTWIVLKEPISVSSEQVLKFRKLNFNGEGEPEELMVDNWRPAQPLKNRQIKASFK

SEQ ID NO: 5900 - DNA, 777 bp, Artificial Sequence
  source: /note="Description of Artificial Sequence: Synthetic Destabilizing Domain (DD)"
tcccatcactgggggtacggcaaacacaacggacctgagcactggcataaggacttccccattgccaagggagagcgccagtcccctgttgacatcgacactcatacagccaagtatgacccttccctgaagcccctgtctgtttcctatgatcaagcaacttccctgaggatcctcaacaatggtcatgctttcaacgtggagtttgatgactctcaggacaaagcagtgctcaagggaggacccctagatggcacttacagattgattcagtttcactttcactggggttcacttgatggacaaggtttagagcatactgtggataaaaagaaatatgctgcagaacttcacttggttcactggaacaccaaatatggggattttgggaaagctgtgcagcaacctgatggagtggccgttctaggtatttttttgaaggttggcagcgctaaaccgtgccttcagaaagttgttgatgtgctggattccattaaaacaaagggcaagagtgctgacttcactaacttcgatcctcgtggcctccttcctgaatccctggattagtggacctacccaggctcactgaccacccctcctcttctggaatgtgtgacctggattgtgctcaaggaacccatcagcgtcagcagcgagcaggtgttgaaattccgtaaacttaacttcaatggggagggtgaacccgaagaactgatggtggacaactggcgcccagctcagccactgaagaacaggcaaatcaaagcttccttcaaa

SEQ ID NO: 5901 - protein, 242 aa, Artificial Sequence
  source: /note="Description of Artificial Sequence: Synthetic Destabilizing Domain (DD)"
SHHWGYGKHNGPEHWHKDFPIAKGERQSPVDIDIHTAKYDPSLKPLSVSYDQATSLRILNNGHAFNVEFDDSQDKAVLKGGPLDGTYRLIQFHFHWGSLDGQGSEHTVDKKKHAAELHLVHWNTKYGDFGKAVQQPDGLAVLGIFLKVGSAKLGLQKVVVVLDSIKTKGKSADFTNFDPRGLLPESLDYWTYPGSLTTAPLLECVTWIVLKEPISVSSEQVLKLRKLNFNGDGEPEELMVDN

SEQ ID NO: 5902 - DNA, 777 bp, Artificial Sequence
  source: /note="Description of Artificial Sequence: Synthetic Destabilizing Domain (DD)"
tcccatcactgggggtacggcaaacacaacggacctgagcactggcataaggacttccccattgccaagggagagcgccagtcccctgttgacatcgacattcatacagccaagtatgacccttccctgaagcccctgtctgtttcctatgatcaagcaacttccctgaggatcctcaacaatggtcatgctttcaacgtggagtttgatgactctcaggataaagcagtgctcaagggaggacccctggatggcacttacagattgattcagtttcactttcactggggttcacttgatggacaaggttcagagcatactgtggataaaaagaaacatgctgcagaacttcacttggttcactggaacaccaaatatggggattttgggaaagctgtgcagcaacctgatggactggccgttctaggtatttttttgaaggttggcagcgctaaactgggccttcagaaagttgttgttgtgctggattccattaaaacaaagggcaagagtgctgacttcactaacttcgatcctcgtggcctccttcctgaatccctggattactggacctacccaggctcactgaccaccgctcctcttctggaatgtgtgacctggattgtgctcaaggaacccatcagcgtcagcagcgagcaggtgttgaaattacgtaaacttaacttcaatggggacggtgaacccgaagaactgatggtggacaactgacgcccagctcagccactgaagaacaggcaaatcaaagcttccttcaaa

SEQ ID NO: 5903 - protein, 165 aa, Artificial Sequence
  source: /note="Description of Artificial Sequence: Synthetic Destabilizing Domain (DD)"
SHHWGYGKHNGPEHWHKDFPIAKGERQSPVDIDTHTAKYDPSLKPLSVSYDQATSLRILNNGHAFNVEFDDSQDKAVLKGGPLDGTYRLIQFHFHWGSLDGQGSEHTVDKKKYAAELHLVHWNTKYGDFGKAVQQPDGLAVLGIFLKVGSAKPGLQKVVDVLDSI

SEQ ID NO: 5904 - protein, 45 aa, Artificial Sequence
  source: /note="Description of Artificial Sequence: Synthetic Destabilizing Domain (DD)"
TKGKSADFTNFDPHGLLPESLDYWTYPGSLTTPPLLECVTWIVLK

SEQ ID NO: 5905 - protein, 47 aa, Artificial Sequence
  source: /note="Description of Artificial Sequence: Synthetic Destabilizing Domain (DD)"
PISLSSEQVLKFRKHNFNGEGEPEELMVDNWRPAQPLKNRQIKASFK

SEQ ID NO: 5906 - DNA, 777 bp, Artificial Sequence
  source: /note="Description of Artificial Sequence: Synthetic Destabilizing Domain (DD)"
tcccatcactgggggtacggcaaacacaacggacctgagcactggcataaggacttccccattgccaagggagagcgccagtcccctgttgacatcgacactcatacagccaagtatgacccttccctgaagcccctgtctgtttcctatgatcaagcaacttccctgaggatcctcaacaatggtcatgctttcaacgtggaatttgatgactctcaggacaaagcagtgctcaagggaggacccctggatggcacttacagattgattcagtttcactttcactggggttcacttgatggacaaggttcagagcatactgtggataaaaagaaatatgctgcagaacttcacttggttcactggaacaccaaatatggggattttgggaaagctgtgcagcaacctgatggactggccgttctaggtatttttttgaaggttggcagcgctaaaccgggccttcagaaagttgttgatgtgctggattccatttaaacaaagggcaagagtgctgacttcactaacttcgatcctcatggcctccttcctgaatccctggattactggacctacccaggctcactgaccacccctcctcttctggaatgtgtgacctggattgtgctcaagtaacccatcagcctcagcagcgagcaggtgttgaaattccgtaagcataacttcaatggggagggtgaacccgaagaactgatggtggacaactggcgcccagctcagccactgaagaacaggcaaatcaaagcttccttcaaa

SEQ ID NO: 5907 - protein, 29 aa, Artificial Sequence
  source: /note="Description of Artificial Sequence: Synthetic Destabilizing Domain (DD)"
TKGKSADFTNFDPHGLLPESLDYWTYQAH

SEQ ID NO: 5908 - protein, 8 aa, Artificial Sequence
  source: /note="Description of Artificial Sequence: Synthetic Destabilizing Domain (DD)"
PPLLFWNV

SEQ ID NO: 5909 - protein, 16 aa, Artificial Sequence
  source: /note="Description of Artificial Sequence: Synthetic Destabilizing Domain (DD)"
PGLCSRNPSASAASRC

SEQ ID NO: 5910 - protein, 15 aa, Artificial Sequence
  source: /note="Description of Artificial Sequence: Synthetic Destabilizing Domain (DD)"
NSVNLTSMGRLNPKN

SEQ ID NO: 5911 - protein, 10 aa, Artificial Sequence
  source: /note="Description of Artificial Sequence: Synthetic Destabilizing Domain (DD)"
WWTTGAQLSH

SEQ ID NO: 5912 - protein, 9 aa, Artificial Sequence
  source: /note="Description of Artificial Sequence: Synthetic Destabilizing Domain (DD)"
RTGKSKLPS

SEQ ID NO: 5913 - DNA, 776 bp, Artificial Sequence
  source: /note="Description of Artificial Sequence: Synthetic Destabilizing Domain (DD)"
tcccatcactgggggtacggcaaacacaacggacctgagcactggcataaggacttccccattgccaagggagagcgccagtcccctgttgacatcgacactcatacagccaagtatgacccttccctgaagcccctgtctgtttcctatgatcaagcaacttccctgaggatcctcaacaatggtcatgctttcaacgtggaatttgatgactctcaggacaaagcagtgctcaagggaggacccctggatggcacttacagattgattcagtttcactttcactggggttcacttgatggacaaggttcagagcatactgtggataaaaagaaatatgctgcagaacttcacttggttcactggaacaccaaatatggggattttgggaaagctgtgcagcaacctgatggactggccgttctaggtatttttttgaaggttggcagcgctaaaccgggccttcagaaagttgttgatgtgctggattccatttaaacaaagggcaagagtgctgacttcactaacttcgatcctcatggcctccttcctgaatccctggattactggacctaccaggcccactgaccacccctcctcttctggaatgtgtgacctggattgtgctcaaggaacccatcagcgtcagcagcgagcaggtgttgaaattccgtaaacttaacttcaatggggaggctgaacccgaagaactgatggtggacaactggcgcccagctcagccactgaagaacaggcaaatcaaagcttccttcaaa

SEQ ID NO: 5914 - protein, 115 aa, Artificial Sequence
  source: /note="Description of Artificial Sequence: Synthetic Destabilizing Domain (DD)"
SHHWGYGKHNGHEHWHKDFPIAKGERQSPVDIDTHTAKYDPSLKPLSVSYDQATSLRILNNGHAFNVEFDDSQDKAVLKGGPLDGTYRLIQFHFHWGSLDGQGSEHTVDKKKYAA

SEQ ID NO: 5915 - protein, 79 aa, Artificial Sequence
  source: /note="Description of Artificial Sequence: Synthetic Destabilizing Domain (DD)"
LHLVHWNTKYGDFGKAVQQPDGLAVLGIFLKVSSAKPGLQKVVDVLDSIKTKGKSADFTNFDPRGLFLNPWITGPTQAH

SEQ ID NO: 5916 - protein, 4 aa, Artificial Sequence
  source: /note="Description of Artificial Sequence: Synthetic Destabilizing Domain (DD)"
PGLC

SEQ ID NO: 5917 - protein, 11 aa, Artificial Sequence
  source: /note="Description of Artificial Sequence: Synthetic Destabilizing Domain (DD)"
RNPSASAASRC

SEQ ID NO: 5918 - protein, 15 aa, Artificial Sequence
  source: /note="Description of Artificial Sequence: Synthetic Destabilizing Domain (DD)"
NSVNLTSMGRVNPKN

SEQ ID NO: 5919 - DNA, 776 bp, Artificial Sequence
  source: /note="Description of Artificial Sequence: Synthetic Destabilizing Domain (DD)"
tcccatcactgggggtacggcaaacacaacggacatgagcactggcataaggacttccccattgccaagggagagcgccagtcccctgttgacatcgacactcatacagccaagtatgacccttccctgaagcccctgtctgtttcctatgatcaagcaacttccctgaggatcctcaacaatggtcatgctttcaacgtggagtttgatgactctcaggacaaagcagtgctcaagggaggacccctggatggcacttacagattgattcagtttcactttcactggggttcacttgatggacaaggttcagagcatactgtggataaaaagaaatatgctgcataacttcacttggttcactggaacaccaaatatggggattttgggaaagctgtgcagcaacctgatggactggccgttctaggtatttttttgaaggttagcagcgctaaaccgggccttcagaaagttgttgatgtgctggattccattaaaacaaagggcaagagtgctgacttcactaacttcgatcctcgtggcctcttcctgaatccctggattactggacctacccaggctcactgaccacccctcctcttctggaatgtgtgacctggattgtgctgaaggaacccatcagcgtcagcagcgagcaggtgttgaaattccgtaaacttaacttcaatggggagggtgaacccgaagaactgatggtggacaactggcgcccagctcagccactgaagaacaggcaaatcaaagcttccttcaaa

SEQ ID NO: 5920 - protein, 151 aa, Artificial Sequence
  source: /note="Description of Artificial Sequence: Synthetic Destabilizing Domain (DD)"
SHHWGYGKHNGPEHWHKDFPIAKGERQSPVDIDTHTAKYDPSLKPLSVSYDQATSLRILNNGHAFNVEFDDSQDKAVLKGGPLDGTYRLIQFHFHWGSLDGQGSEHTVDKKKYAAELHLVHWNTKYGDFGKTVQQPDGLAVLGIFFEGWQR

SEQ ID NO: 5921 - protein, 7 aa, Artificial Sequence
  source: /note="Description of Artificial Sequence: Synthetic Destabilizing Domain (DD)"
TGPSESC

SEQ ID NO: 5922 - protein, 5 aa, Artificial Sequence
  source: /note="Description of Artificial Sequence: Synthetic Destabilizing Domain (DD)"
CAGFH

SEQ ID NO: 5923 - protein, 6 aa, Artificial Sequence
  source: /note="Description of Artificial Sequence: Synthetic Destabilizing Domain (DD)"
NKGQEC

SEQ ID NO: 5924 - protein, 8 aa, Artificial Sequence
  source: /note="Description of Artificial Sequence: Synthetic Destabilizing Domain (DD)"
LRSSWPPS

SEQ ID NO: 5925 - protein, 40 aa, Artificial Sequence
  source: /note="Description of Artificial Sequence: Synthetic Destabilizing Domain (DD)"
IPGLLDLPRLTDHPSSSGMCDLDCAQGTHQRQQRAGVEIP

SEQ ID NO: 5926 - protein, 5 aa, Artificial Sequence
  source: /note="Description of Artificial Sequence: Synthetic Destabilizing Domain (DD)"
LQWGG

SEQ ID NO: 5927 - protein, 25 aa, Artificial Sequence
  source: /note="Description of Artificial Sequence: Synthetic Destabilizing Domain (DD)"
TRRTDGGQLAPSSATEEQANQSFLQ

SEQ ID NO: 5928 - DNA, 778 bp, Artificial Sequence
  source: /note="Description of Artificial Sequence: Synthetic Destabilizing Domain (DD)"
tcccatcactgggggtacggcaaacacaacggacctgagcactggcataaggacttccccattgccaagggagagcgccagtcccctgttgacatcgacactcatacagccaagtatgacccttccctgaagcccctgtctgtttcctatgatcaagcaacttccctgaggatcctcaacaatggtcatgctttcaacgtggagtttgatgactctcaggacaaagcagtgctcaagggaggacccctggatggcacttacagattgattcagtttcactttcactggggttcacttgatggacaaggttcagagcatactgtggataaaaagaaatatgctgcagaacttcacttggttcactggaacaccaaatatggggattttgggaaaactgtgcagcaacctgatggactggccgttctaggtattttttttgaaggttggcagcgctaaaccgggccttcagaaagttgttgatgtgctggattccattaaaacaaagggcaagagtgctgacttcactaacttcgatcctcgtggcctccttcctgaatccctggattactggacttacccaggctcactgaccacccctcctcttctggaatgtgtgacctggattgtgctcaaggaacccatcagcgtcagcagcgagcaggtgttgaaattccgtaaacttaacttcaatggggagggtgaacccgaagaactgatggtggacaactggcgcccagctcagccactgaagaacaggcaaatcaaagcttccttcaaa

SEQ ID NO: 5929 - protein, 151 aa, Artificial Sequence
  source: /note="Description of Artificial Sequence: Synthetic Destabilizing Domain (DD)"
SHHWGYGKHNGPEHWHKDLPIAKGERQSPVDIDTHTAKYDPSLNPLSVSYDQATSLRILNNGHAFNVEFDDSQDKAVLKGGPLDGTYRLIQFHFHWGSLDGQRSEHTVDKKKYAVELHLVHWNTKYGDFGKAVQQPDGLAVLGIFFEGWQR

SEQ ID NO: 5930 - protein, 40 aa, Artificial Sequence
  source: /note="Description of Artificial Sequence: Synthetic Destabilizing Domain (DD)"
IPGLLDLPRLTDHPSSSGMCDLDCAQGTHQRQQRAGIEIP

SEQ ID NO: 5931 - DNA, 778 bp, Artificial Sequence
  source: /note="Description of Artificial Sequence: Synthetic Destabilizing Domain (DD)"
tcccatcactgggggtacggcaaacacaacggacctgagcactggcataaggacctccccattgccaagggagagcgccagtcccctgttgacatcgacactcatacagccaagtatgacccttccctgaatcccctgtctgtttcctatgatcaagcaacttccctgaggatcctcaacaatggtcatgctttcaacgtggagtttgatgactctcaggacaaagcagtgctcaagggaggacccctggatggcacttacagattgattcagtttcactttcactggggttcacttgatggacaacgttcagagcatactgtggataaaaagaaatatgctgtagaacttcacttggttcactggaacaccaaatatggggattttgggaaagctgtgcagcaacctgatggactggccgttctaggtattttttttgaaggttggcagcgctaaaccgggccttcagaaagttgttgatgtgctggattccattaaaacaaagggcaagagtgctgacttcactaacttcgatcctcgtggcctccttcctgaatccctggattactggacctacccaggctcactgaccacccctcctcttctggaatgtgtgacctggattgtgctcaaggaacccatcagcgtcagcagcgagcaggtattgaaattccgtaaacttaacttcaatggggagggtgaacccgaagaactgatggtggacaactggcgcccagctcagccactgaagaacaggcaaatcaaagcttccttcaaa

SEQ ID NO: 5932 - protein, 42 aa, Artificial Sequence
  source: /note="Description of Artificial Sequence: Synthetic Destabilizing Domain (DD)"
SHHWGYGKHKDLNTGIRTSPLPRESASPLLTSTLIQPSMTLP

SEQ ID NO: 5933 - protein, 12 aa, Artificial Sequence
  source: /note="Description of Artificial Sequence: Synthetic Destabilizing Domain (DD)"
SPCLFPMIKQLP

SEQ ID NO: 5934 - protein, 32 aa, Artificial Sequence
  source: /note="Description of Artificial Sequence: Synthetic Destabilizing Domain (DD)"
GSSTMVMLSTWSLMTLRTKQCSREDPWMALTD

SEQ ID NO: 5935 - protein, 52 aa, Artificial Sequence
  source: /note="Description of Artificial Sequence: Synthetic Destabilizing Domain (DD)"
FSFTFTGVHLMDKVQSILWIKRNMLQNFTWFTGTPNMGILGKLCSNLMDWPF

SEQ ID NO: 5936 - protein, 49 aa, Artificial Sequence
  source: /note="Description of Artificial Sequence: Synthetic Destabilizing Domain (DD)"
RLAALNRAFRKLLMCWIPLKQRARVLTSLTSILVASFVNPWITGPTQAH

SEQ ID NO: 5937 - protein, 16 aa, Artificial Sequence
  source: /note="Description of Artificial Sequence: Synthetic Destabilizing Domain (DD)"
PGLCSWNPSASAASRC

SEQ ID NO: 5938 - protein, 15 aa, Artificial Sequence
  source: /note="Description of Artificial Sequence: Synthetic Destabilizing Domain (DD)"
NYVNLTSMGRVNPKN

SEQ ID NO: 5939 - protein, 10 aa, Artificial Sequence
  source: /note="Description of Artificial Sequence: Synthetic Destabilizing Domain (DD)"
RWTTGALLSH

SEQ ID NO: 5940 - DNA, 776 bp, Artificial Sequence
  source: /note="Description of Artificial Sequence: Synthetic Destabilizing Domain (DD)"
tcccatcactgggggtacggcaaacacaaggacctgaacactggcataaggacttccccattgccaagggagagcgccagtcccctgttgacatcgacactcatacagccaagtatgacccttccctgaagcccctgtctgtttcctatgatcaagcaacttccctgaggatcctcaacaatggtcatgctttcaacgtggagtttgatgactctcaggacaaagcagtgctcaagggaggacccctggatggcacttacagattgattcagtttcactttcactggggttcacttgatggacaaggttcagagcatactgtggataaaaagaaatatgctgcagaacttcacttggttcactggaacaccaaatatggggattttgggaaagctgtgcagcaacctgatggactggccgttctaggtatttttttgaaggttggcagcgctaaaccgggccttcagaaagttgttgatgtgctggattccattaaaacaaagggcaagagtgctgacttcactaacttcgatcctcgtggcctccttcgtgaatccctggattactggacctacccaggctcactgaccacccctcctcttctggaatgtgtgacctggattgtgctcatggaacccatcagcgtcagcagcgagcaggtgttgaaattacgtaaacttaacttcaatggggagggtgaacccgaagaactgaaggtggacaactggcgccctgctcagccactgaagaacaggcaaatcaaagcttccttcaaa

SEQ ID NO: 5941 - protein, 142 aa, Artificial Sequence
  source: /note="Description of Artificial Sequence: Synthetic Destabilizing Domain Template"
MSHHWGYGKHNGPEHWHKDFPIAKGERQSPVDIDTHTAKYDPSLKPLSVSYDQATSLRILNNGHAFNVEFDDSQDKAVLKGGPLDGTYRLIQFHFHWGSLDGQGSEHTVDKKKYAAELHLVHWNTKYGDFGKAVQQPDGLAV

SEQ ID NO: 5942 - protein, 141 aa, Artificial Sequence
  source: /note="Description of Artificial Sequence: Synthetic Destabilizing Domain Template"
SHHWGYGKHNGPEHWHKDFPIAKGERQSPVDIDTHTAKYDPSLKPLSVSYDQATSLRILNNGHAFNVEFDDSQDKAVLKGGPLDGTYRLIQFHFHWGSLDGQGSEHTVDKKKYAAELHLVHWNTKYGDFGKAVQQPDGLAV

SEQ ID NO: 5943 - protein, 190 aa, Artificial Sequence
  source: /note="Description of Artificial Sequence: Synthetic Destabilizing Domain Template"
MSHHWGYGKHNGPEHWHKDFPIAKGERQSPVDIDTHTAKYDPSLKPLSVSYDQATSLRILNNGHAFNVEFDDSQDKAVLKGGPLDGTYRLIQFHFHWGSLDGQGSEHTVDKKKYAAELHLVHWNTKYGDFGKAVQQPDGLAVLGIFLKVGSAKPGLQKVVDVLDSIKTKGKSADFTNFDPRGLLPESLDY

SEQ ID NO: 5944 - protein, 189 aa, Artificial Sequence
  source: /note="Description of Artificial Sequence: Synthetic Destabilizing Domain Template"
SHHWGYGKHNGPEHWHKDFPIAKGERQSPVDIDTHTAKYDPSLKPLSVSYDQATSLRILNNGHAFNVEFDDSQDKAVLKGGPLDGTYRLIQFHFHWGSLDGQGSEHTVDKKKYAAELHLVHWNTKYGDFGKAVQQPDGLAVLGIFLKVGSAKPGLQKVVDVLDSIKTKGKSADFTNFDPRGLLPESLDY

SEQ ID NO: 5945 - protein, 89 aa, Artificial Sequence
  source: /note="Description of Artificial Sequence: Synthetic Destabilizing Domain Template"
MSHHWGYGKHNGPEHWHKDFPIAKGERQSPVDIDTHTAKYDPSLKPLSVSYDQATSLRILNNGHAFNVEFDDSQDKAVLKGGPLDGTYR

SEQ ID NO: 5946 - protein, 88 aa, Artificial Sequence
  source: /note="Description of Artificial Sequence: Synthetic Destabilizing Domain Template"
SHHWGYGKHNGPEHWHKDFPIAKGERQSPVDIDTHTAKYDPSLKPLSVSYDQATSLRILNNGHAFNVEFDDSQDKAVLKGGPLDGTYR

SEQ ID NO: 5947 - protein, 243 aa, Artificial Sequence
  source: /note="Description of Artificial Sequence: Synthetic Destabilizing Domain Template"
MSHHWGYGKHNGPEHWHKDFPIAKGERQSPVDIDTHTAKYDPSLKPLSVSYDQATSLRILNNGHAFNVEFDDSQDKAVLKGGPLDGTYRLIQFHFHWGSLDGQGSEHTVDKKKYAAELHLVHWNTKYGDFGKAVQQPDGLAVLGIFLKVGSAKPGLQKVVDVLDSIKTKGKSADFTNFDPRGLLPESLDYWTYPGSLTTPPLLECVTWIVLKEPISVSSEQVLKFRKLNFNGEGEPEELMVDN

SEQ ID NO: 5948 - protein, 242 aa, Artificial Sequence
  source: /note="Description of Artificial Sequence: Synthetic Destabilizing Domain Template"
SHHWGYGKHNGPEHWHKDFPIAKGERQSPVDIDTHTAKYDPSLKPLSVSYDQATSLRILNNGHAFNVEFDDSQDKAVLKGGPLDGTYRLIQFHFHWGSLDGQGSEHTVDKKKYAAELHLVHWNTKYGDFGKAVQQPDGLAVLGIFLKVGSAKPGLQKVVDVLDSIKTKGKSADFTNFDPRGLLPESLDYWTYPGSLTTPPLLECVTWIVLKEPISVSSEQVLKFRKLNFNGEGEPEELMVDN

SEQ ID NO: 5949 - protein, 166 aa, Artificial Sequence
  source: /note="Description of Artificial Sequence: Synthetic Destabilizing Domain Template"
MSHHWGYGKHNGPEHWHKDFPIAKGERQSPVDIDTHTAKYDPSLKPLSVSYDQATSLRILNNGHAFNVEFDDSQDKAVLKGGPLDGTYRLIQFHFHWGSLDGQGSEHTVDKKKYAAELHLVHWNTKYGDFGKAVQQPDGLAVLGIFLKVGSAKPGLQKVVDVLDSI

SEQ ID NO: 5950 - DNA, 495 bp, Artificial Sequence
  source: /note="Description of Artificial Sequence: Synthetic Destabilizing Domain Template"
tcccatcactgggggtacggcaaacacaacggacctgagcactggcataaggacttccccattgccaagggagagcgccagtcccctgttgacatcgacactcatacagccaagtatgacccttccctgaagcccctgtctgtttcctatgatcaagcaacttccctgaggatcctcaacaatggtcatgctttcaacgtggaatttgatgactctcaggacaaagcagtgctcaagggaggacccctggatggcacttacagattgattcagtttcactttcactggggttcacttgatggacaaggttcagagcatactgtggataaaaagaaatatgctgcagaacttcacttggttcactggaacaccaaatatggggattttgggaaagctgtgcagcaacctgatggactggccgttctaggtatttttttgaaggttggcagcgctaaaccgggccttcagaaagttgttgatgtgctggattccatt

SEQ ID NO: 5951 - protein, 116 aa, Artificial Sequence
  source: /note="Description of Artificial Sequence: Synthetic Destabilizing Domain Template"
MSHHWGYGKHNGPEHWHKDFPIAKGERQSPVDIDTHTAKYDPSLKPLSVSYDQATSLRILNNGHAFNVEFDDSQDKAVLKGGPLDGTYRLIQFHFHWGSLDGQGSEHTVDKKKYAA

SEQ ID NO: 5952 - protein, 115 aa, Artificial Sequence
  source: /note="Description of Artificial Sequence: Synthetic Destabilizing Domain Template"
SHHWGYGKHNGPEHWHKDFPIAKGERQSPVDIDTHTAKYDPSLKPLSVSYDQATSLRILNNGHAFNVEFDDSQDKAVLKGGPLDGTYRLIQFHFHWGSLDGQGSEHTVDKKKYAA

SEQ ID NO: 5953 - protein, 152 aa, Artificial Sequence
  source: /note="Description of Artificial Sequence: Synthetic Destabilizing Domain Template"
MSHHWGYGKHNGPEHWHKDFPIAKGERQSPVDIDTHTAKYDPSLKPLSVSYDQATSLRILNNGHAFNVEFDDSQDKAVLKGGPLDGTYRLIQFHFHWGSLDGQGSEHTVDKKKYAAELHLVHWNTKYGDFGKAVQQPDGLAVLGIFLKVGSA

SEQ ID NO: 5954 - protein, 151 aa, Artificial Sequence
  source: /note="Description of Artificial Sequence: Synthetic Destabilizing Domain Template"
SHHWGYGKHNGPEHWHKDFPIAKGERQSPVDIDTHTAKYDPSLKPLSVSYDQATSLRILNNGHAFNVEFDDSQDKAVLKGGPLDGTYRLIQFHFHWGSLDGQGSEHTVDKKKYAAELHLVHWNTKYGDFGKAVQQPDGLAVLGIFLKVGSA

SEQ ID NO: 5955 - protein, 43 aa, Artificial Sequence
  source: /note="Description of Artificial Sequence: Synthetic Destabilizing Domain Template"
MSHHWGYGKHNGPEHWHKDFPIAKGERQSPVDIDTHTAKYDPS

SEQ ID NO: 5956 - protein, 42 aa, Artificial Sequence
  source: /note="Description of Artificial Sequence: Synthetic Destabilizing Domain Template"
SHHWGYGKHNGPEHWHKDFPIAKGERQSPVDIDTHTAKYDPS

SEQ ID NO: 5957 - DNA, 423 bp, Artificial Sequence
  source: /note="Description of Artificial Sequence: Synthetic Destabilizing Domain (DD)"
tcccatcactgggggtacggcaaacacaacgaacctgagcactggcataaggacttccccattgccaagggagagcgccagtcccctgttgacatcgacactcatacagtcaagtatgacccttccctgaagcccctgtctgtttcctatgatcaagcaacttccctgaggatcctcaacaatggtcatgttttcaacgtggagtttgatgactctcaggacaaagcagtgctcaagggaggacccctggatggcacttacagattgattcagtttcactttcactgggttcacttgatggacaaggttcagagcatactgtggataaaaagaaatatgctgcagaatttcacttggttcactggaacaccaaatatggggattttgggagagctgtgcagcaacctgatggactggccgttc

SEQ ID NO: 5958 - DNA, 567 bp, Artificial Sequence
  source: /note="Description of Artificial Sequence: Synthetic Destabilizing Domain (DD)"
tcccatcactgggggtacggcaaacacaacggacctgagcactggcataaggacctccccattgccaagggagagcgccagtcccctgttgacatcgacactcatacagccaagtatgacccttccctgaatcccctgtctgtttcctatgatcaagcaacttccctgaggatcctcaacaatggtcatgctttcaacgtggagtttgatgactctcaggacaaagcagtgctcaagggaggacccctggatggcacttacagattgattcagtttcactttcactggggttcacttgatggacaacgttcagagcatactgtggataaaaagaaatatgctgtagaacttcacttggttcactggaacaccaaatatggggattttgggaaagctgtgcagcaacctgatggactggccgttctaggtatttttttgaaggttggcagcgctaaaccgggccttcagaaagttgttgatgtgctggattccattaaaacaaagggcaagagtggtgacttcactaacttcgatcctcgtggcctccttcctgaatccctggattac

SEQ ID NO: 5959 - DNA, 567 bp, Artificial Sequence
  source: /note="Description of Artificial Sequence: Synthetic Destabilizing Domain (DD)"
tcccatcactgggggtacggcaaacacaacggacctgagcattgggataaggacttccccattgccaagggagagcgccagtcctctgttgacatcgacactcatacagccaagtatgacccttccctgaagcccctgtctgtttcctatgatcaagcaacttccctgaggatcctcaacaatggtcatgctttcaacgtggagtttgatgactctcaggacaaagcagtgctcaaggtaggacccctggatggcacttacagattgattcagtttcactttcactggggttcacttgatggacaaggttcagagcatactgtggataaaaagaaatatgctgcagaacttcacttggttcactggaacaccaaatatggggattttgggagagctgtgcagcaacctgatggactggccgttctaggtatttttttgaaggttggcatcgataaaccgggccttcagaaagttgttgatgtgctggattccattaaaacaaagggcaagagtggtgacttcactaacttcgatcctcgtggcctccttcctgaatccctggattac

SEQ ID NO: 5960 - DNA, 264 bp, Artificial Sequence
  source: /note="Description of Artificial Sequence: Synthetic Destabilizing Domain (DD)"
tcccatcactgggggtacggcaaacacaacggacctgagcactggcataaggacttccccattgccaagggagagcgccagtcccctgttgacatcgacactcatacagccaagtatgacccatccctgaagcccctgtctgtttcctacgatcaagcaacttccctgaggaacctcaacaatggtcatgctttcaacgtggagtttgatgactctcaggacaaagcagtgctcaagggaggacccctggatggcacttacaga

SEQ ID NO: 5961 - DNA, 726 bp, Artificial Sequence
  source: /note="Description of Artificial Sequence: Synthetic Destabilizing Domain (DD)"
tcccatcactgggggtacggcaaacacaacggacctgagcactggcataaggacttccccattgccaagggagagcgccagtcccctgttgacatcgacattcatacagccaagtatgacccttccctgaagcccctgtctgtttcctatgatcaagcaacttccctgaggatcctcaacaatggtcatgctttcaacgtggagtttgatgactctcaggataaagcagtgctcaagggaggacccctggatggcacttacagattgattcagtttcactttcactggggttcacttgatggacaaggttcagagcatactgtggataaaaagaaacatgctgcagaacttcacttggttcactggaacaccaaatatggggattttgggaaagctgtgcagcaacctgatggactggccgttctaggtatttttttgaaggttggcagcgctaaactgggccttcagaaagttgttgttgtgctggattccattaaaacaaagggcaagagtgctgacttcactaacttcgatcctcgtggcctccttcctgaatccctggattactggacctacccaggctcactgaccaccgctcctcttctggaatgtgtgacctggattgtgctcaaggaacccatcagcgtcagcagcgagcgggtgttgaaattacgtaaacttaacttcaatggggacggtgaacccgaagaactgatggtggacaac

SEQ ID NO: 5962 - DNA, 564 bp, Artificial Sequence
  source: /note="Description of Artificial Sequence: Synthetic Destabilizing Domain (DD)"
tcccatcactgggggtacggcaaacacaacggacctgagcactggcataaggacttccccattgccaagggagagcgccagtcccctgttgacatcgacactcatacagccaagtatgacccttccctgaagcccctgtctgtttcctatgatcaagcaacttccctgaggatcctcaacaatggtcatgctttcaacgtggagtttgatgactctcaggacaaagcagtgctcaagggaggacccctagatggcacttacagattgattcagtttcactttcactggggttcacttgatggacaaggtttagagcatactgtggataaaaagaaatatgctgcagaacttcacttggttcactggaacaccaaatatggggattttgggaaagctgtgcagcaacctgatggagtggccgttctaggtatttttttgaaggttggcagcgctaaaccgtgccttcagaaagttgttgatgtgctggattccattaaaacaaagggcaagagtgctgacttcactaacttcgatcctcgtggcctccttcctgaatccctggat

SEQ ID NO: 5963 - DNA, 726 bp, Artificial Sequence
  source: /note="Description of Artificial Sequence: Synthetic Destabilizing Domain (DD)"
tcccatcactgggggtacggcaaacacaacggacctgagcactggcataaggacttccccattgccaagggagagcgccagtcccctgttgacatcgacattcatacagccaagtatgacccttccctgaagcccctgtctgtttcctatgatcaagcaacttccctgaggatcctcaacaatggtcatgctttcaacgtggagtttgatgactctcaggataaagcagtgctcaagggaggacccctggatggcacttacagattgattcagtttcactttcactggggttcacttgatggacaaggttcagagcatactgtggataaaaagaaacatgctgcagaacttcacttggttcactggaacaccaaatatggggattttgggaaagctgtgcagcaacctgatggactggccgttctaggtatttttttgaaggttggcagcgctaaactgggccttcagaaagttgttgttgtgctggattccattaaaacaaagggcaagagtgctgacttcactaacttcgatcctcgtggcctccttcctgaatccctggattactggacctacccaggctcactgaccaccgctcctcttctggaatgtgtgacctggattgtgctcaaggaacccatcagcgtcagcagcgagcaggtgttgaaattacgtaaacttaacttcaatggggacggtgaacccgaagaactgatggtggacaac

SEQ ID NO: 5964 - DNA, 345 bp, Artificial Sequence
  source: /note="Description of Artificial Sequence: Synthetic Destabilizing Domain (DD)"
tcccatcactgggggtacggcaaacacaacggacatgagcactggcataaggacttccccattgccaagggagagcgccagtcccctgttgacatcgacactcatacagccaagtatgacccttccctgaagcccctgtctgtttcctatgatcaagcaacttccctgaggatcctcaacaatggtcatgctttcaacgtggagtttgatgactctcaggacaaagcagtgctcaagggaggacccctggatggcacttacagattgattcagtttcactttcactggggttcacttgatggacaaggttcagagcatactgtggataaaaagaaatatgctgca

SEQ ID NO: 5965 - DNA, 453 bp, Artificial Sequence
  source: /note="Description of Artificial Sequence: Synthetic Destabilizing Domain (DD)"
tcccatcactgggggtacggcaaacacaacggacctgagcactggcataaggacttccccattgccaagggagagcgccagtcccctgttgacatcgacactcatacagccaagtatgacccttccctgaagcccctgtctgtttcctatgatcaagcaacttccctgaggatcctcaacaatggtcatgctttcaacgtggagtttgatgactctcaggacaaagcagtgctcaagggaggacccctggatggcacttacagattgattcagtttcactttcactggggttcacttgatggacaaggttcagagcatactgtggataaaaagaaatatgctgcagaacttcacttggttcactggaacaccaaatatggggattttgggaaaactgtgcagcaacctgatggactggccgttctaggtattttttttgaaggttggcagcgc

SEQ ID NO: 5966 - DNA, 453 bp, Artificial Sequence
  source: /note="Description of Artificial Sequence: Synthetic Destabilizing Domain (DD)"
tcccatcactgggggtacggcaaacacaacggacctgagcactggcataaggacctccccattgccaagggagagcgccagtcccctgttgacatcgacactcatacagccaagtatgacccttccctgaatcccctgtctgtttcctatgatcaagcaacttccctgaggatcctcaacaatggtcatgctttcaacgtggagtttgatgactctcaggacaaagcagtgctcaagggaggacccctggatggcacttacagattgattcagtttcactttcactggggttcacttgatggacaacgttcagagcatactgtggataaaaagaaatatgctgtagaacttcacttggttcactggaacaccaaatatggggattttgggaaagctgtgcagcaacctgatggactggccgttctaggtattttttttgaaggttggcagcgc

SEQ ID NO: 5967 - DNA, 126 bp, Artificial Sequence
  source: /note="Description of Artificial Sequence: Synthetic Destabilizing Domain (DD)"
tcccatcactgggggtacggcaaacacaaggacctgaacactggcataaggacttccccattgccaagggagagcgccagtcccctgttgacatcgacactcatacagccaagtatgacccttccc

SEQ ID NO: 5968 - protein, 30 aa, Artificial Sequence
  source: /note="Description of Artificial Sequence: Synthetic Linker"
GSGSGSGSGSGSGSGSGSGSGSGSGSGSGS

SEQ ID NO: 5969 - DNA, 90 bp, Artificial Sequence
  source: /note="Description of Artificial Sequence: Synthetic Linker"
ggatctggttctggttccggaagtggatctggttcagggtccggtagtggatctgggtcaggaagtggaagcggtagtgggtctggatct

SEQ ID NO: 5970-5979 - skipped (10 entries)

SEQ ID NO: 5980 - protein, 486 aa, Artificial Sequence; identical to SEQ ID NO: 1757
  source: /note="Description of Artificial Sequence: Synthetic Construct"

SEQ ID NO: 5981 - DNA, 1461 bp, Artificial Sequence
  source: /note="Description of Artificial Sequence: Synthetic Construct"
atggccttaccagtgaccgccttgctcctgccgctggccttgctgctccacgccgccaggccggacatccagatgacacagactacatcctccctgtctgcctctctgggagacagagtcaccatcagttgcagggcaagtcaggacattagtaaatatttaaattggtatcagcagaaaccagatggaactgttaaactcctgatctaccatacatcaagattacactcaggagtcccatcaaggttcagtggcagtgggtctggaacagattattctctcaccattagcaacctggagcaagaagatattgccacttacttttgccaacagggtaatacgcttccgtacacgttcggaggggggaccaagctggagatcacaggtggcggtggctcgggcggtggtgggtcgggtggcggcggatctgaggtgaaactgcaggagtcaggacctggcctggtggcgccctcacagagcctgtccgtcacatgcactgtctcaggggtctcattacccgactatggtgtaagctggattcgccagcctccacgaaagggtctggagtggctgggagtaatatggggtagtgaaaccacatactataattcagctctcaaatccagactgaccatcatcaaggacaactccaagagccaagttttcttaaaaatgaacagtctgcaaactgatgacacagccatttactactgtgccaaacattattactacggtggtagctatgctatggactactggggccaaggaacctcagtcaccgtctcctcaaccacgacgccagcgccgcgaccaccaacaccggcgcccaccatcgcgtcgcagcccctgtccctgcgcccagaggcgtgccggccagcggcggggggcgcagtgcacacgagggggctggacttcgcctgtgatatctacatctgggcgcccttggccgggacttgtggggtccttctcctgtcactggttatcaccctttactgcaaacggggcagaaagaaactcctgtatatattcaaacaaccatttatgagaccagtacaaactactcaagaggaagatggctgtagctgccgatttccagaagaagaagaaggaggatgtgaactgagagtgaagttcagcaggagcgcagacgcccccgcgtacaagcagggccagaaccagctctataacgagctcaatctaggacgaagagaggagtacgatgttttggacaagagacgtggccgggaccctgagatggggggaaagccgagaaggaagaaccctcaggaaggcctgtacaatgaactgcagaaagataagatggcggaggcctacagtgagattgggatgaaaggcgagcgccggaggggcaaggggcacgatggcctttaccagggtctcagtacagccaccaaggacacctacgacgcccttcacatgcaggccctgccccctcgctaa

SEQ ID NO: 5982 - protein, 8 aa, Artificial Sequence
  source: /note="Description of Artificial Sequence: Synthetic peptide"
KQEHFPDN

SEQ ID NO: 5983 - DNA, 24 bp, Artificial Sequence
  source: /note="Description of Artificial Sequence: Synthetic oligonucleotide"
aaacaagagcactttcctgataac

SEQ ID NO: 5984 - protein, 21 aa, Artificial Sequence
  source: /note="Description of Artificial Sequence: Synthetic peptide"
LLPSWAITLISVNGIFVICCL

SEQ ID NO: 5985 - DNA, 63 bp, Artificial Sequence
  source: /note="Description of Artificial Sequence: Synthetic oligonucleotide"
ctgttgccgagctgggcgattacgcttatcagtgtaaacggcatctttgtaatatgctgtctg

SEQ ID NO: 5986 - protein, 12 aa, Artificial Sequence
  source: /note="Description of Artificial Sequence: Synthetic peptide"
TYCFAPRCRERR

SEQ ID NO: 5987 - DNA, 36 bp, Artificial Sequence
  source: /note="Description of Artificial Sequence: Synthetic oligonucleotide"
acctactgcttcgcaccaaggtgccgggagagaagg

SEQ ID NO: 5988 - protein, 6 aa, Artificial Sequence
  source: /note="Description of Artificial Sequence: Synthetic peptide"
NHRNRR

SEQ ID NO: 5989 - DNA, 18 bp, Artificial Sequence
  source: /note="Description of Artificial Sequence: Synthetic oligonucleotide"
aaccatagaaacaggcga

SEQ ID NO: 5990 - protein, 103 aa, Artificial Sequence
  source: /note="Description of Artificial Sequence: Synthetic polypeptide"
ADFPTPSISDFEIPTSNIRRIICSTSGGFPEPHLSWLENGEELNAINTTVSQDPETELYAVSSKLDFNMTTNHSFMCLIKYGHLRVNQTFNWNTTKQEHFPDN

SEQ ID NO: 5991 - DNA, 309 bp, Artificial Sequence
  source: /note="Description of Artificial Sequence: Synthetic polynucleotide"
gccgacttcccaacgccaagtatttcagattttgagatacccactagcaatataagacgcatcatctgttcaacctctgggggtttccccgagccccatctgtcttggctggaaaacggggaagaacttaatgctataaacactactgtttctcaagatcccgaaactgaactctatgctgtatccagcaaactcgacttcaatatgactacgaaccattcctttatgtgtcttattaagtatggccacttgcgcgtcaaccaaacctttaattggaatactactaaacaagagcactttcctgataac

SEQ ID NO: 5992 - protein, 227 aa, Artificial Sequence
  source: /note="Description of Artificial Sequence: Synthetic polypeptide"
DKTHTCPPCPAPELLGGPSVFLFPPKPKDTLMISRTPEVTCVVVDVSHEDPEVKFNWYVDGVEVHNAKTKPREEQYNSTYRVVSVLTVLHQDWLNGKEYKCKVSNKALPAPIEKTISKAKGQPREPQVYTLPPSRDELTKNQVSLTCLVKGFYPSDIAVEWESNGQPENNYKTTPPVLDSDGSFFLYSKLTVDKSRWQQGNVFSCSVMHEALHNHYTQKSLSLSPGK

SEQ ID NO: 5993 - DNA, 681 bp, Artificial Sequence
  source: /note="Description of Artificial Sequence: Synthetic polynucleotide"
gacaagacccatacttgccctccgtgccctgcgccggaactgctcggaggtcctagcgtctttcttttcccgccaaaacctaaggatacactcatgattagtcgaacccccgaagtgacgtgtgtagtcgtagacgttagccacgaagaccccgaagttaagttcaattggtacgtggatggcgtcgaggtacataacgctaaaaccaagcctcgagaggagcaatataactccacataccgagtggtctctgtgcttacggtgcttcaccaagattggctcaatggcaaagagtataagtgcaaggtgtctaataaggctctccctgctcccatagaaaagacgataagcaaagcaaagggacagccccgcgagccacaggtatacactctgccgccttctcgagatgagttgactaaaaaccaggtttccctcacctgtttggtcaaaggtttctatccgtctgacatcgctgtcgagtgggagagtaatggacagcctgagaacaactataagaccactccaccggtcttggacagcgatggatctttttttctgtactcaaaacttacagtagacaagtcacgatggcagcagggaaatgtcttttcctgctctgtaatgcacgaagcattgcataaccactatacgcagaaatccctttcattgtctccgggtaaa

SEQ ID NO: 5994 - protein, 37 aa, Artificial Sequence
  source: /note="Description of Artificial Sequence: Synthetic polypeptide"
FSIPQANHSHSGDYHCTGNIGYTLYSSKPVTITVQAP

SEQ ID NO: 5995 - DNA, 111 bp, Artificial Sequence
  source: /note="Description of Artificial Sequence: Synthetic polynucleotide"
ttttctatcccgcaagcgaatcacagccattctggtgattaccactgcacgggcaatatcggttacacactctactcctcaaagcccgtcacgataacggtgcaggcacca

SEQ ID NO: 5996 - protein, 25 aa, Artificial Sequence
  source: /note="Description of Artificial Sequence: Synthetic peptide"
TYCFAPRCRERRRNERLRRESVRPV

SEQ ID NO: 5997 - protein, 550 aa, Artificial Sequence
  source: /note="Description of Artificial Sequence: Synthetic polypeptide"
QKKPRYEIRWKVIESVSSDGHEYIYVDPMQLPYDSTWELPRDQLVLGRTLGSGAFGQVVEATAHGLSHSQATMKVAVKMLKSTARSSEKQALMSELKIMSHLGPHLNVVNLLGACTKGGPIYIITEYCRYGDLVDYLHRNKHTFLQHHSDKRRPPSAELYSNALPVGLPLPSHVSLTGESDGGYMDMSKDESVDYVPMLDMKGDVKYADIESSNYMAPYDNYVPSAPERTCRATLINESPVLSYMDLVGFSYQVANGMEFLASKNCVHRDLAARNVLICEGKLVKICDFGLARDIMRDSNYISKGSTFLPLKWMAPESIFNSLYTTLSDVWSFGILLWEIFTLGGTPYPELPMNEQFYNAIKRGYRMAQPAHASDEIYEIMQKCWEEKFEIRPPFSQLVLLLERLLGEGYKKKYQQVDEEFLRSDHPAILRSQARLPGFHGLRSPLDTSSVLYTAVQPNEGDNDYIIPLPDPKPEVADEGPLEGSPSLASSTLNEVNTSSTISCDSPLEPQDEPEPEPQLELQVEPEPELEQLPDSGCPAPRAEAEDSFL

SEQ ID NO: 5998 - protein, 22 aa, Artificial Sequence
  source: /note="Description of Artificial Sequence: Synthetic peptide"
QKKPRYEIRWKVIESVSSDGHE

SEQ ID NO: 5999 - protein, 183 aa, Artificial Sequence
  source: /note="Description of Artificial Sequence: Synthetic polypeptide"
QKKPRYEIRWKVIESVSSDGHEFIFVDPMQLPYDSTWELPRDQLVLGRTLGSGAFGQVVEATAHGLSHSQATMKVAVAMLKSTARSSEKQALMSELKIMSHLGPHLNVVNLLGACTKGGPIYIITEYCRYGDLVDYLHRNKHTFLQHHSDKRRPPSAELYSNALPVGLPLPSHVSLTGESDGG

SEQ ID NO: 6000 - protein, 23 aa, Artificial Sequence
  source: /note="Description of Artificial Sequence: Synthetic peptide"
IYIWAPLAGICVALLLSLIITLI

SEQ ID NO: 6001 - protein, 25 aa, Artificial Sequence
  source: /note="Description of Artificial Sequence: Synthetic peptide"
VVVISAILALVVLTVISLIILIMLW

SEQ ID NO: 6002 - protein, 22 aa, Artificial Sequence
  source: /note="Description of Artificial Sequence: Synthetic peptide"
TLVLFGAGFGAVITVVVIVVII

SEQ ID NO: 6003 - protein, 32 aa, Artificial Sequence
  source: /note="Description of Artificial Sequence: Synthetic polypeptide"
KCFCKHRSCFRRNEASRETNNSLTFGPEEALA

SEQ ID NO: 6004 - protein, 20 aa, Artificial Sequence
  source: /note="Description of Artificial Sequence: Synthetic Signal sequence"
ALPVTALLLPLALLLHAARP

SEQ ID NO: 6005 - DNA, 60 bp, Artificial Sequence
  source: /note="Description of Artificial Sequence: Synthetic Signal sequence"
gccttaccagtgaccgccttgctcctgccgctggccttgctgctccacgccgccaggccg

SEQ ID NO: 6006 - protein, 21 aa, Artificial Sequence
  source: /note="Description of Artificial Sequence: Synthetic Signal sequence"
CHQQLVISWFSLVFLASPLVA

SEQ ID NO: 6007 - DNA, 63 bp, Artificial Sequence
  source: /note="Description of Artificial Sequence: Synthetic Signal sequence"
tgccaccaacagctcgtgatcagctggttctccctggtgttcctggctagccccctggtggcc

SEQ ID NO: 6008 - DNA, 36 bp, Artificial Sequence
  source: /note="Description of Artificial Sequence: Synthetic Linker"
ggtggatccggaggtggaagtggaggtggatctggt

SEQ ID NO: 6009 - DNA, 36 bp, Artificial Sequence
  source: /note="Description of Artificial Sequence: Synthetic Linker"
ggaggttctggaggtggaagtggaggtggatccggt

SEQ ID NO: 6010 - DNA, 36 bp, Artificial Sequence
  source: /note="Description of Artificial Sequence: Synthetic Linker"
ggaggttctggtggtggtagtggaggaggatcaggt

SEQ ID NO: 6011 - protein, 261 aa, Artificial Sequence
  source: /note="Description of Artificial Sequence: Synthetic Construct"
MIETYNQTSPRSAATGLPISMKIFMYLLTVFLITQMIGSALFAVYLHRRLDKIEDERNLHEDFVFMKTIQRCNTGERSLSLLNCEEIKSQFEGFVKDIMLNKEETKKENSFEMQKGDQNPQIAAHVISEASSKTTSVLQWAEKGYYTMSNNLVTLENGKQLTVKRQGLYYIYAQVTFCSNREASSQAPFIASLCLKSPGRFERILLRAANTHSSAKPCGQQSIGLFGVFELQPGASVFVNVTDPSQVSHGTGFTSFGLLKL

SEQ ID NO: 6012 - DNA, 783 bp, Artificial Sequence
  source: /note="Description of Artificial Sequence: Synthetic Construct"
atgatcgaaacatacaaccaaacttctccccgatctgcggccactggactgcccatcagcatgaaaatttttatgtatttacttactgtttttcttatcacccagatgattgggtcagcactttttgctgtgtatcttcatagaaggttggacaagatagaagatgaaaggaatcttcatgaagattttgtattcatgaaaacgatacagagatgcaacacaggagaaagatccttatccttactgaactgtgaggagattaaaagccagtttgaaggctttgtgaaggatataatgttaaacaaagaggagacgaagaaagaaaacagctttgaaatgcaaaaaggtgatcagaatcctcaaattgcggcacatgtcataagtgaggccagcagtaaaacaacatctgtgttacagtgggctgaaaaaggatactacaccatgagcaacaacttggtaaccctggaaaatgggaaacagctgaccgttaaaagacaaggactctattatatctatgcccaagtcaccttctgttccaatcgggaagcttcgagtcaagctccatttatagccagcctctgcctaaagtcccccggtagattcgagagaatcttactcagagctgcaaatacccacagttccgccaaaccttgcgggcaacaatccattggcttgttcggagtatttgaattgcaaccaggtgcttcggtgtttgtcaatgtgactgatccaagccaagtgagccatggcactggcttcacgtcctttggcttactcaaactc

SEQ ID NO: 6013 - protein, 261 aa, Artificial Sequence
  source: /note="Description of Artificial Sequence: Synthetic Construct"
MIETYNQTSPRSAATGLPISMKIFMYLLTVFLITQMIGSALFAVYLHRRLDKIEDERNLHEDFVFMKTIQRCNTGERSLSLLNCEEIKSQFEGFVKDIMLNKEETKKENSFEMQKGDQNPQIAAHVISEASSKTTSVLQWAEKGYYTMSNNLVTLENGKQLTVKRQGLYYIYAQVTFCSNREASSQAPFIASLCLKSPGRFERILLRAANTHSSAKPCGQQSIGLHGVFELQPGASVFVNVTDPSQVSHGTGFTSFGLLKL

SEQ ID NO: 6014 - DNA, 783 bp, Artificial Sequence
  source: /note="Description of Artificial Sequence: Synthetic Construct"
atgatcgaaacatacaaccaaacttctccccgatctgcggccactggactgcccatcagcatgaaaatttttatgtatttacttactgtttttcttatcacccagatgattgggtcagcactttttgctgtgtatcttcatagaaggttggacaagatagaagatgaaaggaatcttcatgaagattttgtattcatgaaaacgatacagagatgcaacacaggagaaagatccttatccttactgaactgtgaggagattaaaagccagtttgaaggctttgtgaaggatataatgttaaacaaagaggagacgaagaaagaaaacagctttgaaatgcaaaaaggtgatcagaatcctcaaattgcggcacatgtcataagtgaggccagcagtaaaacaacatctgtgttacagtgggctgaaaaaggatactacaccatgagcaacaacttggtaaccctggaaaatgggaaacagctgaccgttaaaagacaaggactctattatatctatgcccaagtcaccttctgttccaatcgggaagcttcgagtcaagctccatttatagccagcctctgcctaaagtcccccggtagattcgagagaatcttactcagagctgcaaatacccacagttccgccaaaccttgcgggcaacaatccattggcttgcacggagtatttgaattgcaaccaggtgcttcggtgtttgtcaatgtgactgatccaagccaagtgagccatggcactggcttcacgtcctttggcttactcaaactc

SEQ ID NO: 6015 - protein, 261 aa, Artificial Sequence
  source: /note="Description of Artificial Sequence: Synthetic Construct"
MIETYNQTSPRSAATGLPISMKIFMYLLTVFLITQMIGSALFAVYLHRRLDKIEDERNLHEDFVFMKTIQRCNTGERSLSLLNCEEIKSQFEGFVKDIMLNKEETKKENSFEMQKGDQNPQIAAHVISEASSKTTSVLQWAEKGYYTMSNNLVTLENGKQLTVKRQGLYYIGAQVTFCSNREASSQAPFIASLCLKSPGRFERILLRAANTHSSAKPCGQQSIHLFGVFELQPGASVFVNVTDPSQVSHGTGFTSFGLLKL

SEQ ID NO: 6016 - DNA, 783 bp, Artificial Sequence
  source: /note="Description of Artificial Sequence: Synthetic Construct"
atgatcgaaacatacaaccaaacttctccccgatctgcggccactggactgcccatcagcatgaaaatttttatgtatttacttactgtttttcttatcacccagatgattgggtcagcactttttgctgtgtatcttcatagaaggttggacaagatagaagatgaaaggaatcttcatgaagattttgtattcatgaaaacgatacagagatgcaacacaggagaaagatccttatccttactgaactgtgaggagattaaaagccagtttgaaggctttgtgaaggatataatgttaaacaaagaggagacgaagaaagaaaacagctttgaaatgcaaaaaggtgatcagaatcctcaaattgcggcacatgtcataagtgaggccagcagtaaaacaacatctgtgttacagtgggctgaaaaaggatactacaccatgagcaacaacttggtaaccctggaaaatgggaaacagctgaccgttaaaagacaaggactctattatatcggtgcccaagtcaccttctgttccaatcgggaagcttcgagtcaagctccatttatagccagcctctgcctaaagtcccccggtagattcgagagaatcttactcagagctgcaaatacccacagttccgccaaaccttgcgggcaacaatccattcacttgtttggagtatttgaattgcaaccaggtgcttcggtgtttgtcaatgtgactgatccaagccaagtgagccatggcactggcttcacgtcctttggcttactcaaactc

SEQ ID NO: 6017 - protein, 261 aa, Artificial Sequence
  source: /note="Description of Artificial Sequence: Synthetic Construct"
MIETYNQTSPRSAATGLPISMKIFMYLLTVFLITQMIGSALFAVYLHRRLDKIEDERNLHEDFVFMKTIQRCNTGERSLSLLNCEEIKSQFEGFVKDIMLNKEETKKENSFEMQKGDQNPQIAAHVISEASSKTTSVLQWAEKGYYTMSNNLVTLENGKQLTVKRQGLYGIYAQVTFCSNREASSQAPFIASLCLKSPGRFERILLRAANTHSSAKPCGQQSIGLWGVFELQPGASVFVNVTDPSQVSHGTGFTSFGLLKL

SEQ ID NO: 6018 - DNA, 783 bp, Artificial Sequence
  source: /note="Description of Artificial Sequence: Synthetic Construct"
atgatcgaaacatacaaccaaacttctccccgatctgcggccactggactgcccatcagcatgaaaatttttatgtatttacttactgtttttcttatcacccagatgattgggtcagcactttttgctgtgtatcttcatagaaggttggacaagatagaagatgaaaggaatcttcatgaagattttgtattcatgaaaacgatacagagatgcaacacaggagaaagatccttatccttactgaactgtgaggagattaaaagccagtttgaaggctttgtgaaggatataatgttaaacaaagaggagacgaagaaagaaaacagctttgaaatgcaaaaaggtgatcagaatcctcaaattgcggcacatgtcataagtgaggccagcagtaaaacaacatctgtgttacagtgggctgaaaaaggatactacaccatgagcaacaacttggtaaccctggaaaatgggaaacagctgaccgttaaaagacaaggactctatggtatctatgcccaagtcaccttctgttccaatcgggaagcttcgagtcaagctccatttatagccagcctctgcctaaagtcccccggtagattcgagagaatcttactcagagctgcaaatacccacagttccgccaaaccttgcgggcaacaatccattggcttgtggggagtatttgaattgcaaccaggtgcttcggtgtttgtcaatgtgactgatccaagccaagtgagccatggcactggcttcacgtcctttggcttactcaaactc

SEQ ID NO: 6019 - protein, 261 aa, Artificial Sequence
  source: /note="Description of Artificial Sequence: Synthetic Construct"
MIETYNQTSPRSAATGLPISMKIFMYLLTVFLITQMIGSALFAVYLHRRLDKIEDERNLHEDFVFMKTIQRCNTGERSLSLLNCEEIKSQFEGFVKDIMLNKEETKKENSFEMQKGDQNPQIAAGVISEASSKTTSVLQWAEKGYYTMSNNLVTLENGKQLTVKRQGLYYIYAQVTFCSNREASSQAPFIASLCLKSPGRFERILLRAANTHSSAKPCGQQSIHLGFVFELQPGASVFVNVTDPSQVSHGTGFTSFGLLKL

SEQ ID NO: 6020 - DNA, 783 bp, Artificial Sequence
  source: /note="Description of Artificial Sequence: Synthetic Construct"
atgatcgaaacatacaaccaaacttctccccgatctgcggccactggactgcccatcagcatgaaaatttttatgtatttacttactgtttttcttatcacccagatgattgggtcagcactttttgctgtgtatcttcatagaaggttggacaagatagaagatgaaaggaatcttcatgaagattttgtattcatgaaaacgatacagagatgcaacacaggagaaagatccttatccttactgaactgtgaggagattaaaagccagtttgaaggctttgtgaaggatataatgttaaacaaagaggagacgaagaaagaaaacagctttgaaatgcaaaaaggtgatcagaatcctcaaattgcggcaggtgtcataagtgaggccagcagtaaaacaacatctgtgttacagtgggctgaaaaaggatactacaccatgagcaacaacttggtaaccctggaaaatgggaaacagctgaccgttaaaagacaaggactctattatatctatgcccaagtcaccttctgttccaatcgggaagcttcgagtcaagctccatttatagccagcctctgcctaaagtcccccggtagattcgagagaatcttactcagagctgcaaatacccacagttccgccaaaccttgcgggcaacaatccattcacttgggattcgtatttgaattgcaaccaggtgcttcggtgtttgtcaatgtgactgatccaagccaagtgagccatggcactggcttcacgtcctttggcttactcaaactc

SEQ ID NO: 6021 - protein, 239 aa, Artificial Sequence
  source: /note="Description of Artificial Sequence: Synthetic Construct"
MVSKGEELFTGVVPILVELDGDVNGHKFSVSGEGEGDATYGKLTLKFICTTGKLPVPWPTLVTTLTYGVQCFSRYPDHMKQHDFFKSAMPEGYVQERTIFFKDDGNYKTRAEVKFEGDTLVNRIELKGIDFKEDGNILGHKLEYNYNSHNVYIMADKQKNGIKVNFKIRHNIEDGSVQLADHYQQNTPIGDGPVLLPDNHYLSTQSKLSKDPNEKRDHMVLLEFVTAAGITLGMDELYK

SEQ ID NO: 6022 - DNA, 717 bp, Artificial Sequence
  source: /note="Description of Artificial Sequence: Synthetic Construct"
atggtgagcaagggcgaggagctgttcaccggggtggtgcccatcctggtcgagctggacggcgacgtaaacggccacaagttcagcgtgtccggcgagggcgagggcgatgccacctacggcaagctgaccctgaagttcatctgcaccaccggcaagctgcccgtgccctggcccaccctcgtgaccaccctgacctacggcgtgcagtgcttcagccgctaccccgaccacatgaagcagcacgacttcttcaagtccgccatgcccgaaggctacgtccaggagcgcaccatcttcttcaaggacgacggcaactacaagacccgcgccgaggtgaagttcgagggcgacaccctggtgaaccgcatcgagctgaagggcatcgacttcaaggaggacggcaacatcctggggcacaagctggagtacaactacaacagccacaacgtctatatcatggccgacaagcagaagaacggcatcaaggtgaacttcaagatccgccacaacatcgaggacggcagcgtgcagctcgccgaccactaccagcagaacacccccatcggcgacggccccgtgctgctgcccgacaaccactacctgagcacccagtccaagctgagcaaagaccccaacgagaagcgcgatcacatggtcctgctggagttcgtgaccgccgccgggatcactctcggcatggacgagctgtacaag

SEQ ID NO: 6023 - protein, 524 aa, Artificial Sequence
  source: /note="Description of Artificial Sequence: Synthetic Construct"
MSHHWGYGKHNGPEHWHKDFPIAKGERQSPVDIDTHTAKYDPSLKPLSVSYDQATSLRNLNNGHAFNVEFDDSQDKAVLKGGPLDGTYRLIQFHFHWGSLDRQGSEHTVDKKKYAAELHLVHWNTKYGDFGKAVQQPDGLAVLGIFLKVGSAKPGLQKVVDVLDSIKTKGKSADFTNFDPRGLLPESLDYWTYPGSLTTPPLLECVTWIVLKEPISVSSEQVLKFRKLNFNGEGEPEELMVDNWRPAQPLKNRQIKASFKGSGMIETYNQTSPRSAATGLPISMKIFMYLLTVFLITQMIGSALFAVYLHRRLDKIEDERNLHEDFVFMKTIQRCNTGERSLSLLNCEEIKSQFEGFVKDIMLNKEETKKENSFEMQKGDQNPQIAAHVISEASSKTTSVLQWAEKGYYTMSNNLVTLENGKQLTVKRQGLYYIYAQVTFCSNREASSQAPFIASLCLKSPGRFERILLRAANTHSSAKPCGQQSIHLGGVFELQPGASVFVNVTDPSQVSHGTGFTSFGLLKL

SEQ ID NO: 6024 - DNA, 1575 bp, Artificial Sequence
  source: /note="Description of Artificial Sequence: Synthetic Construct"
atgtcccatcactgggggtacggcaaacacaacggacctgagcactggcataaggacttccccattgccaagggagagcgccagtcccctgttgacatcgacactcatacagccaagtatgacccttccctgaagcccctgtctgtttcctatgatcaagcaacttccctgagaaacctcaacaatggtcatgctttcaacgtggagtttgatgactctcaggacaaagcagtgctcaagggaggacccctggatggcacttacagattgattcagtttcactttcactggggttcacttgatcgacaaggttcagagcatactgtggataaaaagaaatatgctgcagaacttcacttggttcactggaacaccaaatatggggattttgggaaagctgtgcagcaacctgatggactggccgttctaggtatttttttgaaggttggcagcgctaaaccgggccttcagaaagttgttgatgtgctggattccattaaaacaaagggcaagagtgctgacttcactaacttcgatcctcgtggcctccttcctgaatccctggattactggacctacccaggctcactgaccacccctcctcttctggaatgtgtgacctggattgtgctcaaggaacccatcagcgtcagcagcgagcaggtgttgaaattccgtaaacttaacttcaatggggagggtgaacccgaagaactgatggtggacaactggcgcccagctcagccactgaagaacaggcaaatcaaagcttccttcaaaggatccggtatgatcgaaacatacaaccaaacttctccccgatctgcggccactggactgcccatcagcatgaaaatttttatgtatttacttactgtttttcttatcacccagatgattgggtcagcactttttgctgtgtatcttcatagaaggttggacaagatagaagatgaaaggaatcttcatgaagattttgtattcatgaaaacgatacagagatgcaacacaggagaaagatccttatccttactgaactgtgaggagattaaaagccagtttgaaggctttgtgaaggatataatgttaaacaaagaggagacgaagaaagaaaacagctttgaaatgcaaaaaggtgatcagaatcctcaaattgcggcacatgtcataagtgaggccagcagtaaaacaacatctgtgttacagtgggctgaaaaaggatactacaccatgagcaacaacttggtaaccctggaaaatgggaaacagctgaccgttaaaagacaaggactctattatatctatgcccaagtcaccttctgttccaatcgggaagcttcgagtcaagctccatttatagccagcctctgcctaaagtcccccggtagattcgagagaatcttactcagagctgcaaatacccacagttccgccaaaccttgcgggcaacaatccattcacttgggaggagtatttgaattgcaaccaggtgcttcggtgtttgtcaatgtgactgatccaagccaagtgagccatggcactggcttcacgtcctttggcttactcaaactctga

SEQ ID NO: 6025 - protein, 524 aa, Artificial Sequence
  source: /note="Description of Artificial Sequence: Synthetic Construct"
MSHHWGYGKHNGPEHWHKDFPIAKGERQSPVDIDTHTAKYDPSLKPLSVSYDQATSLRILNNGHAFNVEFDDSQDKAVLKGGPLDGTYRLIQFHFHWGSLDGQGSEHTVDKKKYAAELHLVHWNTKYGDFGKAVQQPDGLAVLGIFLKVGSAKPGHQKVVDVLDSIKTKGKSADFTNFDPRGLLPESLDYWTYPGSLTTPPLLECVTWIVLKEPISVSSEQVLKFRKLNFNGEGEPEELMVDNWRPAQPLKNRQIKASFKGSGMIETYNQTSPRSAATGLPISMKIFMYLLTVFLITQMIGSALFAVYLHRRLDKIEDERNLHEDFVFMKTIQRCNTGERSLSLLNCEEIKSQFEGFVKDIMLNKEETKKENSFEMQKGDQNPQIAAHVISEASSKTTSVLQWAEKGYYTMSNNLVTLENGKQLTVKRQGLYYIYAQVTFCSNREASSQAPFIASLCLKSPGRFERILLRAANTHSSAKPCGQQSIHLGGVFELQPGASVFVNVTDPSQVSHGTGFTSFGLLKL

SEQ ID NO: 6026 - DNA, 1575 bp, Artificial Sequence
  source: /note="Description of Artificial Sequence: Synthetic Construct"
atgtcccatcactgggggtacggcaaacacaacggacctgagcactggcataaggacttccccattgccaagggagagcgccagtcccctgttgacatcgacactcatacagccaagtatgacccttccctgaagcccctgtctgtttcctatgatcaagcaacttccctgagaatcctcaacaatggtcatgctttcaacgtggagtttgatgactctcaggacaaagcagtgctcaagggaggacccctggatggcacttacagattgattcagtttcactttcactggggttcacttgatggacaaggttcagagcatactgtggataaaaagaaatatgctgcagaacttcacttggttcactggaacaccaaatatggggattttgggaaagctgtgcagcaacctgatggactggccgttctaggtatttttttgaaggttggcagcgctaaaccgggccatcagaaagttgttgatgtgctggattccattaaaacaaagggcaagagtgctgacttcactaacttcgatcctcgtggcctccttcctgaatccctggattactggacctacccaggctcactgaccacccctcctcttctggaatgtgtgacctggattgtgctcaaggaacccatcagcgtcagcagcgagcaggtgttgaaattccgtaaacttaacttcaatggggagggtgaacccgaagaactgatggtggacaactggcgcccagctcagccactgaagaacaggcaaatcaaagcttccttcaaaggatccggtatgatcgaaacatacaaccaaacttctccccgatctgcggccactggactgcccatcagcatgaaaatttttatgtatttacttactgtttttcttatcacccagatgattgggtcagcactttttgctgtgtatcttcatagaaggttggacaagatagaagatgaaaggaatcttcatgaagattttgtattcatgaaaacgatacagagatgcaacacaggagaaagatccttatccttactgaactgtgaggagattaaaagccagtttgaaggctttgtgaaggatataatgttaaacaaagaggagacgaagaaagaaaacagctttgaaatgcaaaaaggtgatcagaatcctcaaattgcggcacatgtcataagtgaggccagcagtaaaacaacatctgtgttacagtgggctgaaaaaggatactacaccatgagcaacaacttggtaaccctggaaaatgggaaacagctgaccgttaaaagacaaggactctattatatctatgcccaagtcaccttctgttccaatcgggaagcttcgagtcaagctccatttatagccagcctctgcctaaagtcccccggtagattcgagagaatcttactcagagctgcaaatacccacagttccgccaaaccttgcgggcaacaatccattcacttgggaggagtatttgaattgcaaccaggtgcttcggtgtttgtcaatgtgactgatccaagccaagtgagccatggcactggcttcacgtcctttggcttactcaaactctga

SEQ ID NO: 6027 - protein, 533 aa, Artificial Sequence
  source: /note="Description of Artificial Sequence: Synthetic Construct"
MSHHWGYGKHNGPEHWHKDFPIAKGERQSPVDIDTHTAKYDPSLKPLSVSYDQATSLRILNNDHAFNVVFDDSQDKAVLKGGPLDGTYRLIQFHFHWGSLDGQGSEHTVDKKKYAAELHLVHWNTKYGDFGKAVQQPDGLAVLGIFLKVGSAKPGLQKVVDVLDSIKTKGKSADFTNFDPRGLLPESLDYWTYPGSLTTPPLLECVTWIVLKEPISVSSEQVLKFRKLNFIGEGEPEELMVDNWRPAQPLKNRQIKASFKGGSGGGSGGGSGMIETYNQTSPRSAATGLPISMKIFMYLLTVFLITQMIGSALFAVYLHRRLDKIEDERNLHEDFVFMKTIQRCNTGERSLSLLNCEEIKSQFEGFVKDIMLNKEETKKENSFEMQKGDQNPQIAAHVISEASSKTTSVLQWAEKGYYTMSNNLVTLENGKQLTVKRQGLYYIYAQVTFCSNREASSQAPFIASLCLKSPGRFERILLRAANTHSSAKPCGQQSIHLGGVFELQPGASVFVNVTDPSQVSHGTGFTSFGLLKL

SEQ ID NO: 6028 - DNA, 1602 bp, Artificial Sequence
  source: /note="Description of Artificial Sequence: Synthetic Construct"
atgtcccatcactgggggtacggcaaacacaacggacctgagcactggcataaggacttccccattgccaagggagagcgccagtcccctgttgacatcgacactcatacagccaagtatgacccttccctgaagcccctgtctgtttcctatgatcaagcaacttccctgaggatcctcaacaatgatcatgctttcaacgtggtgtttgatgactctcaggacaaagcagtgctcaagggaggacccctggatggcacttacagattgattcagtttcactttcactggggttcacttgatggacaaggttcagagcatactgtggataaaaagaaatatgctgcagaacttcacttggttcactggaacaccaaatatggggattttgggaaagctgtacagcaacctgatggactggccgttctaggtatttttttgaaggttggcagcgctaaaccgggccttcagaaagttgttgatgtgctggattccattaaaacaaagggcaagagtgctgacttcactaacttcgatcctcgtggcctccttcctgaatccctggattactggacctacccaggctcactgaccacccctcctcttctggaatgtgtgacctggattgtgctcaaggaacccatcagcgtcagcagcgagcaggtgttgaaattccgtaaacttaacttcattggggagggtgaacccgaagaactgatggtggacaactggcgcccagctcagccactgaagaacaggcaaatcaaagcttccttcaaaggaggatccggaggtggaagtggaggtggatctggtatgatcgaaacatacaaccaaacttctccccgatctgcggccactggactgcccatcagcatgaaaatttttatgtatttacttactgtttttcttatcacccagatgattgggtcagcactttttgctgtgtatcttcatagaaggttggacaagatagaagatgaaaggaatcttcatgaagattttgtattcatgaaaacgatacagagatgcaacacaggagaaagatccttatccttactgaactgtgaggagattaaaagccagtttgaaggctttgtgaaggatataatgttaaacaaagaggagacgaagaaagaaaacagctttgaaatgcaaaaaggtgatcagaatcctcaaattgcggcacatgtcataagtgaggccagcagtaaaacaacatctgtgttacagtgggctgaaaaaggatactacaccatgagcaacaacttggtaaccctggaaaatgggaaacagctgaccgttaaaagacaaggactctattatatctatgcccaagtcaccttctgttccaatcgggaagcttcgagtcaagctccatttatagccagcctctgcctaaagtcccccggtagattcgagagaatcttactcagagctgcaaatacccacagttccgccaaaccttgcgggcaacaatccattcacttgggaggagtatttgaattgcaaccaggtgcttcggtgtttgtcaatgtgactgatccaagccaagtgagccatggcactggcttcacgtcctttggcttactcaaactctga

SEQ ID NO: 6029 - protein, 533 aa, Artificial Sequence
  source: /note="Description of Artificial Sequence: Synthetic Construct"
MSHHWGYGKHNGPEHWHKDFPIAKGERQSPVDIDTHTAKYDPSLKPLSVSYDQATNLRILNNGHAFNVEFDDSQDKAVLKGGPLDGTYRLIQFHFHWGSLDGQGSEHTVDKKKYAAELHLVHWNTKYGDFGKAVQQPDGLAVLGIFLKVGSAKPGLQKVVDVLDSIKTKGKSADFTNFDPRGLLPESLDYWTYPGSLTTPPLLECVTWIVLKEPISVSSEQVLKFRKLNFNGEGEPEELMVDNWRPAQPLKNRQIKASFKGGSGGGSGGGSGMIETYNQTSPRSAATGLPISMKIFMYLLTVFLITQMIGSALFAVYLHRRLDKIEDERNLHEDFVFMKTIQRCNTGERSLSLLNCEEIKSQFEGFVKDIMLNKEETKKENSFEMQKGDQNPQIAAHVISEASSKTTSVLQWAEKGYYTMSNNLVTLENGKQLTVKRQGLYYIYAQVTFCSNREASSQAPFIASLCLKSPGRFERILLRAANTHSSAKPCGQQSIHLGGVFELQPGASVFVNVTDPSQVSHGTGFTSFGLLKL

SEQ ID NO: 6030 - DNA, 1602 bp, Artificial Sequence
  source: /note="Description of Artificial Sequence: Synthetic Construct"
atgtcccatcactgggggtacggcaaacacaacggacctgagcactggcataaggacttccccattgccaagggagagcgccagtcccctgttgacatcgacactcatacagccaagtatgacccttccctgaagcccctgtctgtttcctatgatcaagcaactaatctgaggatcctcaacaatggtcatgctttcaacgtggagtttgatgactctcaggacaaagcagtgctcaagggaggacccctggatggcacttacagattgattcagtttcactttcactggggttcacttgatggacaaggttcagagcatactgtggataaaaagaaatatgctgcagaacttcacttggttcactggaacaccaaatatggggattttgggaaagctgtgcagcaacctgatggactggccgttctaggtatttttttgaaggttggcagcgctaaaccgggccttcagaaagttgttgatgtgctggattccattaaaacaaagggcaagagtgctgacttcactaacttcgatcctcgtggcctccttcctgaatccctggattactggacctacccaggctcactgaccacccctcctcttctggaatgtgtgacctggattgtgctcaaggaacccatcagcgtcagcagcgagcaggtgttgaaattccgtaaacttaacttcaatggggagggtgaacccgaagaactgatggtggacaactggcgcccagctcagccactgaagaacaggcaaatcaaagcttccttcaaaggaggatccggaggtggaagtggaggtggatctggtatgatcgaaacatacaaccaaacttctccccgatctgcggccactggactgcccatcagcatgaaaatttttatgtatttacttactgtttttcttatcacccagatgattgggtcagcactttttgctgtgtatcttcatagaaggttggacaagatagaagatgaaaggaatcttcatgaagattttgtattcatgaaaacgatacagagatgcaacacaggagaaagatccttatccttactgaactgtgaggagattaaaagccagtttgaaggctttgtgaaggatataatgttaaacaaagaggagacgaagaaagaaaacagctttgaaatgcaaaaaggtgatcagaatcctcaaattgcggcacatgtcataagtgaggccagcagtaaaacaacatctgtgttacagtgggctgaaaaaggatactacaccatgagcaacaacttggtaaccctggaaaatgggaaacagctgaccgttaaaagacaaggactctattatatctatgcccaagtcaccttctgttccaatcgggaagcttcgagtcaagctccatttatagccagcctctgcctaaagtcccccggtagattcgagagaatcttactcagagctgcaaatacccacagttccgccaaaccttgcgggcaacaatccattcacttgggaggagtatttgaattgcaaccaggtgcttcggtgtttgtcaatgtgactgatccaagccaagtgagccatggcactggcttcacgtcctttggcttactcaaactctga

SEQ ID NO: 6031 - protein, 533 aa, Artificial Sequence
  source: /note="Description of Artificial Sequence: Synthetic Construct"
MSHHWGYGKHNGPEHWHKDFPIAKGERQSPVDIDTHTAKYDPSLKPLSVSYDQATSLRILNNGHAFNVEFDFSQDKAVLKGGPLDGTYRLIQFHFHWGSLDGQGSEHTVDKKKYAAELHLVHWNTKYGDFGKAVQQPDGLAVLGIFLKVGSAKPGLQKVVDVLDSIKTKGKSADFTNFDPRGLLPESLDYWTYPGSLTTPPLLECVTWIVLKEPISVSSEQVLKFRKLNFNGEGEPEELMFDNWRPAQLLKNRQIKASFKGGSGGGSGGGSGMIETYNQTSPRSAATGLPISMKIFMYLLTVFLITQMIGSALFAVYLHRRLDKIEDERNLHEDFVFMKTIQRCNTGERSLSLLNCEEIKSQFEGFVKDIMLNKEETKKENSFEMQKGDQNPQIAAHVISEASSKTTSVLQWAEKGYYTMSNNLVTLENGKQLTVKRQGLYYIYAQVTFCSNREASSQAPFIASLCLKSPGRFERILLRAANTHSSAKPCGQQSIHLGGVFELQPGASVFVNVTDPSQVSHGTGFTSFGLLKL

SEQ ID NO: 6032 - DNA, 1602 bp, Artificial Sequence
  source: /note="Description of Artificial Sequence: Synthetic Construct"
atgtcccatcactgggggtacggcaaacacaacggacctgagcactggcataaggacttccccattgccaagggagagcgccagtcccctgttgacatcgacactcatacagccaagtatgacccttccctgaagcccctgtctgtttcctatgatcaagcaacttccctgaggatcctcaacaatggtcatgctttcaacgtggagtttgatttttctcaggacaaagcagtgctcaagggaggacccctggatggcacttacagattgattcagtttcactttcactggggttcacttgatggacaaggttcagagcatactgtggataaaaagaaatatgctgcagaacttcacttggttcactggaacaccaaatatggggattttgggaaagctgtgcagcaacctgatggactggccgttctaggtatttttttgaaggttggcagcgctaaaccgggccttcagaaagttgttgatgtgctggattccattaaaacaaagggcaagagtgctgacttcactaacttcgatcctcgtggcctccttcctgaatccctggattactggacctacccaggctcactgaccacccctcctcttctggaatgtgtgacctggattgtgctcaaggaacccatcagcgtcagcagcgagcaggtgttgaaattccgtaaacttaacttcaatggggagggtgaacccgaagaactgatgtttgacaactggcgcccagctcagttgctgaagaacaggcaaatcaaagcttccttcaaaggaggatccggaggtggaagtggaggtggatctggtatgatcgaaacatacaaccaaacttctccccgatctgcggccactggactgcccatcagcatgaaaatttttatgtatttacttactgtttttcttatcacccagatgattgggtcagcactttttgctgtgtatcttcatagaaggttggacaagatagaagatgaaaggaatcttcatgaagattttgtattcatgaaaacgatacagagatgcaacacaggagaaagatccttatccttactgaactgtgaggagattaaaagccagtttgaaggctttgtgaaggatataatgttaaacaaagaggagacgaagaaagaaaacagctttgaaatgcaaaaaggtgatcagaatcctcaaattgcggcacatgtcataagtgaggccagcagtaaaacaacatctgtgttacagtgggctgaaaaaggatactacaccatgagcaacaacttggtaaccctggaaaatgggaaacagctgaccgttaaaagacaaggactctattatatctatgcccaagtcaccttctgttccaatcgggaagcttcgagtcaagctccatttatagccagcctctgcctaaagtcccccggtagattcgagagaatcttactcagagctgcaaatacccacagttccgccaaaccttgcgggcaacaatccattcacttgggaggagtatttgaattgcaaccaggtgcttcggtgtttgtcaatgtgactgatccaagccaagtgagccatggcactggcttcacgtcctttggcttactcaaactctga

SEQ ID NO: 6033 - protein, 533 aa, Artificial Sequence
  source: /note="Description of Artificial Sequence: Synthetic Construct"
MSHHWGYGKHNGPEHWHKDFPIAKGERQSPVDIDTHTAKYDPSLKPLSVSYDQATSLRILNNGHAFNVEFLDSQDKAVLKGGPLDGNYRLIQFHFHWGSLDGQGSEHTVDKKKYAAELHLVHWNTKYGDFGKAVQQPDGLAVLGIFLKVGSAKPGLQKVVDVLDSIKTKGKSADFTNFDPRGLLPESLDYWTYPGSLTTPPLLECVTWIVLKEPISVSSEQVLKFRKLNFNGEGEPEELMVDNWRPAQPRKNRQIKASFKGGSGGGSGGGSGMIETYNQTSPRSAATGLPISMKIFMYLLTVFLITQMIGSALFAVYLHRRLDKIEDERNLHEDFVFMKTIQRCNTGERSLSLLNCEEIKSQFEGFVKDIMLNKEETKKENSFEMQKGDQNPQIAAHVISEASSKTTSVLQWAEKGYYTMSNNLVTLENGKQLTVKRQGLYYIYAQVTFCSNREASSQAPFIASLCLKSPGRFERILLRAANTHSSAKPCGQQSIHLGGVFELQPGASVFVNVTDPSQVSHGTGFTSFGLLKL

SEQ ID NO: 6034 - DNA, 1602 bp, Artificial Sequence
  source: /note="Description of Artificial Sequence: Synthetic Construct"
atgtcccatcactgggggtacggcaaacacaacggacctgagcactggcataaggacttccccattgccaagggagagcgccagtcccctgttgacatcgacactcatacagccaagtatgacccttccctgaagcccctgtctgtttcctatgatcaagcaacttccctgaggatcctcaacaatggtcatgctttcaacgtggagtttttggactctcaggacaaagcagtgctcaagggaggacccctggatggcaattacagattgattcagtttcactttcactggggttcacttgatggacaaggttcagagcatactgtggataaaaagaaatatgctgcagaacttcacttggttcactggaacaccaaatatggggattttgggaaagctgtgcagcaacctgatggactggccgttctaggtatttttttgaaggttggcagcgctaaaccgggccttcagaaagttgttgatgtgctggattccattaaaacaaagggcaagagtgctgacttcactaacttcgatcctcgtggcctccttcctgaatccctggattactggacctacccaggctcactgaccacccctcctcttctggaatgtgtgacctggattgtgctcaaggaacccatcagcgtcagcagcgagcaggtgttgaaattccgtaaacttaacttcaatggggagggtgaacccgaagaactgatggtggacaactggcgcccagctcagccacggaagaacaggcaaatcaaagcttccttcaaaggaggatccggaggtggaagtggaggtggatctggtatgatcgaaacatacaaccaaacttctccccgatctgcggccactggactgcccatcagcatgaaaatttttatgtatttacttactgtttttcttatcacccagatgattgggtcagcactttttgctgtgtatcttcatagaaggttggacaagatagaagatgaaaggaatcttcatgaagattttgtattcatgaaaacgatacagagatgcaacacaggagaaagatccttatccttactgaactgtgaggagattaaaagccagtttgaaggctttgtgaaggatataatgttaaacaaagaggagacgaagaaagaaaacagctttgaaatgcaaaaaggtgatcagaatcctcaaattgcggcacatgtcataagtgaggccagcagtaaaacaacatctgtgttacagtgggctgaaaaaggatactacaccatgagcaacaacttggtaaccctggaaaatgggaaacagctgaccgttaaaagacaaggactctattatatctatgcccaagtcaccttctgttccaatcgggaagcttcgagtcaagctccatttatagccagcctctgcctaaagtcccccggtagattcgagagaatcttactcagagctgcaaatacccacagttccgccaaaccttgcgggcaacaatccattcacttgggaggagtatttgaattgcaaccaggtgcttcggtgtttgtcaatgtgactgatccaagccaagtgagccatggcactggcttcacgtcctttggcttactcaaactctga

SEQ ID NO: 6035 - protein, 533 aa, Artificial Sequence
  source: /note="Description of Artificial Sequence: Synthetic Construct"
MSHHWGYGKHNGPEHWHKDFPIAKGERQSPVDIDTHTAKYDPSLKPLSVSYDQATSLRILNNGHAFNVEFDDSQDKAVLKGGPLDGTYRLIQFHFHWGSLDGQGSEHTVDKKKYAAELHLVHWNTKYGDFGKAVQQPDGLAVLGIFLKVGSAKPGLQKVVDVLDSIKTKGKSADFTNFDPRGSLPESLDYWTYPGSLTTPPLLECVTWIVLKEPISVSSEQVLKFRKLNFNGEGEPEELMVDNWRPAQPLKNRQIKASFKGGSGGGSGGGSGMIETYNQTSPRSAATGLPISMKIFMYLLTVFLITQMIGSALFAVYLHRRLDKIEDERNLHEDFVFMKTIQRCNTGERSLSLLNCEEIKSQFEGFVKDIMLNKEETKKENSFEMQKGDQNPQIAAHVISEASSKTTSVLQWAEKGYYTMSNNLVTLENGKQLTVKRQGLYYIYAQVTFCSNREASSQAPFIASLCLKSPGRFERILLRAANTHSSAKPCGQQSIHLGGVFELQPGASVFVNVTDPSQVSHGTGFTSFGLLKL

SEQ ID NO: 6036 - DNA, 1602 bp, Artificial Sequence
  source: /note="Description of Artificial Sequence: Synthetic Construct"
atgtcccatcactgggggtacggcaaacacaacggacctgagcactggcataaggacttccccattgccaagggagagcgccagtcccctgttgacatcgacactcatacagccaagtatgacccttccctgaagcccctgtctgtttcctatgatcaagcaacttccctgaggatcctcaacaatggtcatgctttcaacgtggagtttgatgactctcaggacaaagcagtgctcaagggaggacccctggatggcacttacagattgattcagtttcactttcactggggttcacttgatggacaaggttcagagcatactgtggataaaaagaaatatgctgcagaacttcacttggttcactggaacaccaaatatggggattttgggaaagctgtgcagcaacctgatggactggccgttctaggtatttttttgaaggttggcagcgctaaaccgggccttcagaaagttgttgatgtgctggattccattaaaacaaagggcaagagtgctgacttcactaacttcgatcctcgtggcagtcttcctgaatccctggattactggacctacccaggctcactgaccacccctcctcttctggaatgtgtgacctggattgtgctcaaggaacccatcagcgtcagcagcgagcaggtgttgaaattccgtaaacttaacttcaatggggagggtgaacccgaagaactgatggtggacaactggcgcccagctcagccactgaagaacaggcaaatcaaagcttccttcaaaggaggatccggaggtggaagtggaggtggatctggtatgatcgaaacatacaaccaaacttctccccgatctgcggccactggactgcccatcagcatgaaaatttttatgtatttacttactgtttttcttatcacccagatgattgggtcagcactttttgctgtgtatcttcatagaaggttggacaagatagaagatgaaaggaatcttcatgaagattttgtattcatgaaaacgatacagagatgcaacacaggagaaagatccttatccttactgaactgtgaggagattaaaagccagtttgaaggctttgtgaaggatataatgttaaacaaagaggagacgaagaaagaaaacagctttgaaatgcaaaaaggtgatcagaatcctcaaattgcggcacatgtcataagtgaggccagcagtaaaacaacatctgtgttacagtgggctgaaaaaggatactacaccatgagcaacaacttggtaaccctggaaaatgggaaacagctgaccgttaaaagacaaggactctattatatctatgcccaagtcaccttctgttccaatcgggaagcttcgagtcaagctccatttatagccagcctctgcctaaagtcccccggtagattcgagagaatcttactcagagctgcaaatacccacagttccgccaaaccttgcgggcaacaatccattcacttgggaggagtatttgaattgcaaccaggtgcttcggtgtttgtcaatgtgactgatccaagccaagtgagccatggcactggcttcacgtcctttggcttactcaaactctga

SEQ ID NO: 6037 - protein, 533 aa, Artificial Sequence
  source: /note="Description of Artificial Sequence: Synthetic Construct"
MSHHWGYGKHNGPEHWHKDFPIAKGERQSPVDIDTHTAKYDPSLKPLSVSYDQATSLRILNNGHAFNVEFDDSQDKAVLKGGPLDGTYRLIQFHFHWGSLDGQGSEHTVDKKKYAAELHLVHWNTKYGDFGKAVQQPDGLAVLGIFLKVGSAKPGHQKVVDVLDSIKTKGKCADFTNYDPRGLLPDSLDYWTYPGSLTTPPLLECVTWIVLKEPISVSSEQVLKFRKLNFNGEGEPEELMVDNWRPAQPLKNRQIKASFKGGSGGGSGGGSGMIETYNQTSPRSAATGLPISMKIFMYLLTVFLITQMIGSALFAVYLHRRLDKIEDERNLHEDFVFMKTIQRCNTGERSLSLLNCEEIKSQFEGFVKDIMLNKEETKKENSFEMQKGDQNPQIAAHVISEASSKTTSVLQWAEKGYYTMSNNLVTLENGKQLTVKRQGLYYIYAQVTFCSNREASSQAPFIASLCLKSPGRFERILLRAANTHSSAKPCGQQSIHLGGVFELQPGASVFVNVTDPSQVSHGTGFTSFGLLKL

SEQ ID NO: 6038 - DNA, 1602 bp, Artificial Sequence
  source: /note="Description of Artificial Sequence: Synthetic Construct"
atgtcccatcactgggggtacggcaaacacaacggacctgagcactggcataaggacttccccattgccaagggagagcgccagtcccctgttgacatcgacactcatacagccaagtatgacccttccctgaagcccctgtctgtttcctatgatcaagcaacttccctgaggatcctcaacaatggtcatgctttcaacgtggagtttgatgactctcaggacaaagcagtgctcaagggaggacccctggatggcacttacagattgattcagtttcactttcactggggttcacttgatggacaaggttcagagcatactgtggataaaaagaaatatgctgcagaacttcacttggttcactggaacaccaaatatggggattttgggaaagctgtgcagcaacctgatggactggccgttctaggtatttttttgaaggttggcagcgctaaaccgggccatcagaaagttgttgatgtgctggattccattaaaacaaagggcaagtgtgctgacttcactaactacgatcctcgtggcctccttcctgattccctggattactggacctacccaggctcactgaccacccctcctcttctggaatgtgtgacctggattgtgctcaaggaacccatcagcgtcagcagcgagcaggtgttgaaattccgtaaacttaacttcaatggggagggtgaacccgaagaactgatggtggacaactggcgcccagctcagccactgaagaacaggcaaatcaaagcttccttcaaaggaggatccggaggtggaagtggaggtggatctggtatgatcgaaacatacaaccaaacttctccccgatctgcggccactggactgcccatcagcatgaaaatttttatgtatttacttactgtttttcttatcacccagatgattgggtcagcactttttgctgtgtatcttcatagaaggttggacaagatagaagatgaaaggaatcttcatgaagattttgtattcatgaaaacgatacagagatgcaacacaggagaaagatccttatccttactgaactgtgaggagattaaaagccagtttgaaggctttgtgaaggatataatgttaaacaaagaggagacgaagaaagaaaacagctttgaaatgcaaaaaggtgatcagaatcctcaaattgcggcacatgtcataagtgaggccagcagtaaaacaacatctgtgttacagtgggctgaaaaaggatactacaccatgagcaacaacttggtaaccctggaaaatgggaaacagctgaccgttaaaagacaaggactctattatatctatgcccaagtcaccttctgttccaatcgggaagcttcgagtcaagctccatttatagccagcctctgcctaaagtcccccggtagattcgagagaatcttactcagagctgcaaatacccacagttccgccaaaccttgcgggcaacaatccattcacttgggaggagtatttgaattgcaaccaggtgcttcggtgtttgtcaatgtgactgatccaagccaagtgagccatggcactggcttcacgtcctttggcttactcaaactctga

SEQ ID NO: 6039 - protein, 533 aa, Artificial Sequence
  source: /note="Description of Artificial Sequence: Synthetic Construct"
MSHHWGYGKHNGPEHWHKDFPIAKGELQSPVDIDTHTAKYDPSLKPLSVSYDQATSLRILNNGHAFNVEFDDSQDKAVLKGGPLDGIYRLIQFHFHWGSLDGQGSEHTVDKKKYAAELHLVYWNTKYGDFGKAVQQPDGLAVLGIFLKVGSAKPGLQKVVDVLDSIKTKGKSADFTNFDPRGLLPESLDYWTYPGSLTTPPLLECVTWIVLKEPISVSSEQVLKFRKLNFNGEGEPEELMVDNWRPAQPLKDRQIKASFKGGSGGGSGGGSGMIETYNQTSPRSAATGLPISMKIFMYLLTVFLITQMIGSALFAVYLHRRLDKIEDERNLHEDFVFMKTIQRCNTGERSLSLLNCEEIKSQFEGFVKDIMLNKEETKKENSFEMQKGDQNPQIAAHVISEASSKTTSVLQWAEKGYYTMSNNLVTLENGKQLTVKRQGLYYIYAQVTFCSNREASSQAPFIASLCLKSPGRFERILLRAANTHSSAKPCGQQSIHLGGVFELQPGASVFVNVTDPSQVSHGTGFTSFGLLKL

SEQ ID NO: 6040 - DNA, 1602 bp, Artificial Sequence
  source: /note="Description of Artificial Sequence: Synthetic Construct"
atgtcccatcactgggggtacggcaaacacaacggacctgagcactggcataaggacttccccattgccaagggagagctccagtcccctgttgacatcgacactcatacagccaagtatgacccttccctgaagcccctgtctgtttcctatgatcaagcaacttccctgaggatcctcaacaatggtcatgctttcaacgtggagtttgatgactctcaggacaaagcagtgctcaagggaggacccctggatggcatttacagattgattcagtttcactttcactggggttcacttgatggacaaggttcagagcatactgtggataaaaagaaatatgctgcagaacttcacttggtttactggaacaccaaatatggggattttgggaaagctgtgcagcaacctgatggactggccgttctaggtatttttttgaaggttggcagcgctaaaccgggccttcagaaagttgttgatgtgctggattccattaaaacaaagggcaagagtgctgacttcactaacttcgatcctcgtggcctccttcctgaatccctggattactggacctacccaggctcactgaccacccctcctcttctggaatgtgtgacctggattgtgctcaaggaacccatcagcgtcagcagcgagcaggtgttgaaattccgtaaacttaacttcaatggggagggtgaacccgaagaactgatggtggacaactggcgcccagctcagccactgaaggacaggcaaatcaaagcttccttcaaaggaggatccggaggtggaagtggaggtggatctggtatgatcgaaacatacaaccaaacttctccccgatctgcggccactggactgcccatcagcatgaaaatttttatgtatttacttactgtttttcttatcacccagatgattgggtcagcactttttgctgtgtatcttcatagaaggttggacaagatagaagatgaaaggaatcttcatgaagattttgtattcatgaaaacgatacagagatgcaacacaggagaaagatccttatccttactgaactgtgaggagattaaaagccagtttgaaggctttgtgaaggatataatgttaaacaaagaggagacgaagaaagaaaacagctttgaaatgcaaaaaggtgatcagaatcctcaaattgcggcacatgtcataagtgaggccagcagtaaaacaacatctgtgttacagtgggctgaaaaaggatactacaccatgagcaacaacttggtaaccctggaaaatgggaaacagctgaccgttaaaagacaaggactctattatatctatgcccaagtcaccttctgttccaatcgggaagcttcgagtcaagctccatttatagccagcctctgcctaaagtcccccggtagattcgagagaatcttactcagagctgcaaatacccacagttccgccaaaccttgcgggcaacaatccattcacttgggaggagtatttgaattgcaaccaggtgcttcggtgtttgtcaatgtgactgatccaagccaagtgagccatggcactggcttcacgtcctttggcttactcaaactctga

SEQ ID NO: 6041 - protein, 533 aa, Artificial Sequence
  source: /note="Description of Artificial Sequence: Synthetic Construct"
MSHHWGYGKHNGPEHWHKDFPIAKGERQSPVDIDTHTAKYDPSLKPLSVSYDQATSLRILNNGHAFNVEFDDSQDKAVLKGGPLDGTYRLIQFHFHWGSLDGQGSEHTVDKKKYAAELHLVHWNTKYGDFGKAVQQPDGLAVLGIFLKVGSAKPGLQKVVDVLDSIKTKGKSADFTNFDPRGLLPESLDYWTYPGSPTTPPLLECVTWIVLKEPISVSSEQVLKFRKLNFNGEGEPEELMVDNWRPAQPLKNRQIKASFKGGSGGGSGGGSGMIETYNQTSPRSAATGLPISMKIFMYLLTVFLITQMIGSALFAVYLHRRLDKIEDERNLHEDFVFMKTIQRCNTGERSLSLLNCEEIKSQFEGFVKDIMLNKEETKKENSFEMQKGDQNPQIAAHVISEASSKTTSVLQWAEKGYYTMSNNLVTLENGKQLTVKRQGLYYIYAQVTFCSNREASSQAPFIASLCLKSPGRFERILLRAANTHSSAKPCGQQSIHLGGVFELQPGASVFVNVTDPSQVSHGTGFTSFGLLKL

SEQ ID NO: 6042 - DNA, 1602 bp, Artificial Sequence
  source: /note="Description of Artificial Sequence: Synthetic Construct"
atgtcccatcactgggggtacggcaaacacaacggacctgagcactggcataaggacttccccattgccaagggagagcgtcagtcccctgttgacatcgacactcatacagccaagtatgacccttccctgaagcccctgtctgtttcctatgatcaagcaacttccctgaggatcctcaacaatggtcatgctttcaacgtggagtttgatgactctcaggacaaagcagtgctcaagggaggacccctggatggcacttacagattgattcagtttcactttcactggggttcacttgatggacaaggttcagagcatactgtggataaaaagaaatatgctgcagaacttcacttggttcactggaacaccaaatatggggattttgggaaagctgtgcagcaacctgatggactggccgttctaggtatttttttgaaggttggcagcgctaaaccgggccttcagaaagttgttgatgtgctggattccattaaaacaaagggcaagagtgctgacttcactaacttcgatcctcgtggcctccttcctgaatccctggattactggacctacccaggctcaccgaccacccctcctcttctggaatgtgtgacctggattgtgctcaaggaacccatcagcgtcagcagcgagcaggtgttgaaattccgtaaacttaacttcaatggggagggtgaacccgaagaactgatggtggacaactggcgcccagctcagccactgaagaacaggcaaatcaaagcttccttcaaaggaggatccggaggtggaagtggaggtggatctggtatgatcgaaacatacaaccaaacttctccccgatctgcggccactggactgcccatcagcatgaaaatttttatgtatttacttactgtttttcttatcacccagatgattgggtcagcactttttgctgtgtatcttcatagaaggttggacaagatagaagatgaaaggaatcttcatgaagattttgtattcatgaaaacgatacagagatgcaacacaggagaaagatccttatccttactgaactgtgaggagattaaaagccagtttgaaggctttgtgaaggatataatgttaaacaaagaggagacgaagaaagaaaacagctttgaaatgcaaaaaggtgatcagaatcctcaaattgcggcacatgtcataagtgaggccagcagtaaaacaacatctgtgttacagtgggctgaaaaaggatactacaccatgagcaacaacttggtaaccctggaaaatgggaaacagctgaccgttaaaagacaaggactctattatatctatgcccaagtcaccttctgttccaatcgggaagcttcgagtcaagctccatttatagccagcctctgcctaaagtcccccggtagattcgagagaatcttactcagagctgcaaatacccacagttccgccaaaccttgcgggcaacaatccattcacttgggaggagtatttgaattgcaaccaggtgcttcggtgtttgtcaatgtgactgatccaagccaagtgagccatggcactggcttcacgtcctttggcttactcaaactctga

SEQ ID NO: 6043 - protein, 533 aa, Artificial Sequence
  source: /note="Description of Artificial Sequence: Synthetic Construct"
MSHHWGYGKHNGPEHWHKDFPIAKGERQSPVDIDTHTAKYDPSLKPLSVSYDQATSLRILNNGHAFNVEFDDSQDKAVLKGGPLDGTYRLIQFHFHWGSLDGQGSEHTVDKKKYAAELHLVHWNTKYGDFGKAVQQPDGLAVLGIFLKVGSAKPGLQKVVDVLDSIKTKGKSADFTNFDPRGLLPESLDYWTYPGSLTTPPLLECVTWIVLKEPISVSSEQVLKFRKLNFNGEGEPEELMVDNWRPAQPLKNRQIKASFKGGSGGGSGGGSGMIETYNQTSPRSAATGLPISMKIFMYLLTVFLITQMIGSALFAVYLHRRLDKIEDERNLHEDFVFMKTIQRCNTGERSLSLLNCEEIKSQFEGFVKDIMLNKEETKKENSFEMQKGDQNPQIAAHVISEASSKTTSVLQWAEKGYYTMSNNLVTLENGKQLTVKRQGLYYIYAQVTFCSNREASSQAPFIASLCLKSPGRFERILLRAANTHSSAKPCGQQSIHLGGVFELQPGASVFVNVTDPSQVSHGTGFTSFGLLKL

SEQ ID NO: 6044 - DNA, 1602 bp, Artificial Sequence
  source: /note="Description of Artificial Sequence: Synthetic Construct"
atgtcccatcactgggggtacggcaaacacaacggacctgagcactggcataaggacttccccattgccaagggagagcgccagtcccctgttgacatcgacactcatacagccaagtatgacccttccctgaagcccctgtctgtttcctatgatcaagcaacttccctgaggatcctcaacaatggtcatgctttcaacgtggagtttgatgactctcaggacaaagcagtgctcaagggaggacccctggatggcacttacagattgattcagtttcactttcactggggttcacttgatggacaaggttcagagcatactgtggataaaaagaaatatgctgcagaacttcacttggttcactggaacaccaaatatggggattttgggaaagctgtgcagcaacctgatggactggccgttctaggtatttttttgaaggttggcagcgctaaaccgggccttcagaaagttgttgatgtgctggattccattaaaacaaagggcaagagtgctgacttcactaacttcgatcctcgtggcctccttcctgaatccctggattactggacctacccaggctcactgaccacccctcctcttctggaatgtgtgacctggattgtgctcaaggaacccatcagcgtcagcagcgagcaggtgttgaaattccgtaaacttaacttcaatggggagggtgaacccgaagaactgatggtggacaactggcgcccagctcagccactgaagaacaggcaaatcaaagcttccttcaaaggaggatccggaggtggaagtggaggtggatctggtatgatcgaaacatacaaccaaacttctccccgatctgcggccactggactgcccatcagcatgaaaatttttatgtatttacttactgtttttcttatcacccagatgattgggtcagcactttttgctgtgtatcttcatagaaggttggacaagatagaagatgaaaggaatcttcatgaagattttgtattcatgaaaacgatacagagatgcaacacaggagaaagatccttatccttactgaactgtgaggagattaaaagccagtttgaaggctttgtgaaggatataatgttaaacaaagaggagacgaagaaagaaaacagctttgaaatgcaaaaaggtgatcagaatcctcaaattgcggcacatgtcataagtgaggccagcagtaaaacaacatctgtgttacagtgggctgaaaaaggatactacaccatgagcaacaacttggtaaccctggaaaatgggaaacagctgaccgttaaaagacaaggactctattatatctatgcccaagtcaccttctgttccaatcgggaagcttcgagtcaagctccatttatagccagcctctgcctaaagtcccccggtagattcgagagaatcttactcagagctgcaaatacccacagttccgccaaaccttgcgggcaacaatccattcacttgggaggagtatttgaattgcaaccaggtgcttcggtgtttgtcaatgtgactgatccaagccaagtgagccatggcactggcttcacgtcctttggcttactcaaactctga

SEQ ID NO: 6045 - protein, 533 aa, Artificial Sequence
  source: /note="Description of Artificial Sequence: Synthetic Construct"
MSHHWGYGKHNGPEHWHKDFPIAKGERQSPVDIDTHTAKYDPSLKPLSVSYDQATSLRILNNGHAFNVEFDDSQDKAVLKGGPLDGTYRLIQFHFHWGSLDGQGSEHTVDKKKYAAELHLVHWNTKYGDFGKAVQQPDGLAVLGIFLKVGSAKPGHQKVVDVLDSIKTKGKSADFTNFDPRGLLPESLDYWTYPGSLTTPPLLECVTWIVLKEPISVSSEQVLKFRKLNFNGEGEPEELMVDNWRPAQPLKNRQIKASFKGGSGGGSGGGSGMIETYNQTSPRSAATGLPISMKIFMYLLTVFLITQMIGSALFAVYLHRRLDKIEDERNLHEDFVFMKTIQRCNTGERSLSLLNCEEIKSQFEGFVKDIMLNKEETKKENSFEMQKGDQNPQIAAHVISEASSKTTSVLQWAEKGYYTMSNNLVTLENGKQLTVKRQGLYYIYAQVTFCSNREASSQAPFIASLCLKSPGRFERILLRAANTHSSAKPCGQQSIGLFGVFELQPGASVFVNVTDPSQVSHGTGFTSFGLLKL

SEQ ID NO: 6046 - DNA, 1602 bp, Artificial Sequence
  source: /note="Description of Artificial Sequence: Synthetic Construct"
atgtcccatcactgggggtacggcaaacacaacggacctgagcactggcataaggacttccccattgccaagggagagcgccagtcccctgttgacatcgacactcatacagccaagtatgacccttccctgaagcccctgtctgtttcctatgatcaagcaacttccctgagaatcctcaacaatggtcatgctttcaacgtggagtttgatgactctcaggacaaagcagtgctcaagggaggacccctggatggcacttacagattgattcagtttcactttcactggggttcacttgatggacaaggttcagagcatactgtggataaaaagaaatatgctgcagaacttcacttggttcactggaacaccaaatatggggattttgggaaagctgtgcagcaacctgatggactggccgttctaggtatttttttgaaggttggcagcgctaaaccgggccatcagaaagttgttgatgtgctggattccattaaaacaaagggcaagagtgctgacttcactaacttcgatcctcgtggcctccttcctgaatccctggattactggacctacccaggctcactgaccacccctcctcttctggaatgtgtgacctggattgtgctcaaggaacccatcagcgtcagcagcgagcaggtgttgaaattccgtaaacttaacttcaatggggagggtgaacccgaagaactgatggtggacaactggcgcccagctcagccactgaagaacaggcaaatcaaagcttccttcaaaggaggatccggaggtggaagtggaggtggatctggtatgatcgaaacatacaaccaaacttctccccgatctgcggccactggactgcccatcagcatgaaaatttttatgtatttacttactgtttttcttatcacccagatgattgggtcagcactttttgctgtgtatcttcatagaaggttggacaagatagaagatgaaaggaatcttcatgaagattttgtattcatgaaaacgatacagagatgcaacacaggagaaagatccttatccttactgaactgtgaggagattaaaagccagtttgaaggctttgtgaaggatataatgttaaacaaagaggagacgaagaaagaaaacagctttgaaatgcaaaaaggtgatcagaatcctcaaattgcggcacatgtcataagtgaggccagcagtaaaacaacatctgtgttacagtgggctgaaaaaggatactacaccatgagcaacaacttggtaaccctggaaaatgggaaacagctgaccgttaaaagacaaggactctattatatctatgcccaagtcaccttctgttccaatcgggaagcttcgagtcaagctccatttatagccagcctctgcctaaagtcccccggtagattcgagagaatcttactcagagctgcaaatacccacagttccgccaaaccttgcgggcaacaatccattggcttgttcggagtatttgaattgcaaccaggtgcttcggtgtttgtcaatgtgactgatccaagccaagtgagccatggcactggcttcacgtcctttggcttactcaaactctga

SEQ ID NO: 6047 - protein, 533 aa, Artificial Sequence
  source: /note="Description of Artificial Sequence: Synthetic Construct"
MSHHWGYGKHNGPEHWHKDFPIAKGERQSPVDIDTHTAKYDPSLKPLSVSYDQATSLRILNNGHAFNVEFDDSQDKAVLKGGPLDGTYRLIQFHFHWGSLDGQGSEHTVDKKKYAAELHLVHWNTKYGDFGKAVQQPDGLAVLGIFLKVGSAKPGHQKVVDVLDSIKTKGKSADFTNFDPRGLLPESLDYWTYPGSLTTPPLLECVTWIVLKEPISVSSEQVLKFRKLNFNGEGEPEELMVDNWRPAQPLKNRQIKASFKGGSGGGSGGGSGMIETYNQTSPRSAATGLPISMKIFMYLLTVFLITQMIGSALFAVYLHRRLDKIEDERNLHEDFVFMKTIQRCNTGERSLSLLNCEEIKSQFEGFVKDIMLNKEETKKENSFEMQKGDQNPQIAAHVISEASSKTTSVLQWAEKGYYTMSNNLVTLENGKQLTVKRQGLYYIYAQVTFCSNREASSQAPFIASLCLKSPGRFERILLRAANTHSSAKPCGQQSIGLHGVFELQPGASVFVNVTDPSQVSHGTGFTSFGLLKL

SEQ ID NO: 6048 - DNA, 1602 bp, Artificial Sequence
  source: /note="Description of Artificial Sequence: Synthetic Construct"
atgtcccatcactgggggtacggcaaacacaacggacctgagcactggcataaggacttccccattgccaagggagagcgccagtcccctgttgacatcgacactcatacagccaagtatgacccttccctgaagcccctgtctgtttcctatgatcaagcaacttccctgagaatcctcaacaatggtcatgctttcaacgtggagtttgatgactctcaggacaaagcagtgctcaagggaggacccctggatggcacttacagattgattcagtttcactttcactggggttcacttgatggacaaggttcagagcatactgtggataaaaagaaatatgctgcagaacttcacttggttcactggaacaccaaatatggggattttgggaaagctgtgcagcaacctgatggactggccgttctaggtatttttttgaaggttggcagcgctaaaccgggccatcagaaagttgttgatgtgctggattccattaaaacaaagggcaagagtgctgacttcactaacttcgatcctcgtggcctccttcctgaatccctggattactggacctacccaggctcactgaccacccctcctcttctggaatgtgtgacctggattgtgctcaaggaacccatcagcgtcagcagcgagcaggtgttgaaattccgtaaacttaacttcaatggggagggtgaacccgaagaactgatggtggacaactggcgcccagctcagccactgaagaacaggcaaatcaaagcttccttcaaaggaggatccggaggtggaagtggaggtggatctggtatgatcgaaacatacaaccaaacttctccccgatctgcggccactggactgcccatcagcatgaaaatttttatgtatttacttactgtttttcttatcacccagatgattgggtcagcactttttgctgtgtatcttcatagaaggttggacaagatagaagatgaaaggaatcttcatgaagattttgtattcatgaaaacgatacagagatgcaacacaggagaaagatccttatccttactgaactgtgaggagattaaaagccagtttgaaggctttgtgaaggatataatgttaaacaaagaggagacgaagaaagaaaacagctttgaaatgcaaaaaggtgatcagaatcctcaaattgcggcacatgtcataagtgaggccagcagtaaaacaacatctgtgttacagtgggctgaaaaaggatactacaccatgagcaacaacttggtaaccctggaaaatgggaaacagctgaccgttaaaagacaaggactctattatatctatgcccaagtcaccttctgttccaatcgggaagcttcgagtcaagctccatttatagccagcctctgcctaaagtcccccggtagattcgagagaatcttactcagagctgcaaatacccacagttccgccaaaccttgcgggcaacaatccattggcttgcacggagtatttgaattgcaaccaggtgcttcggtgtttgtcaatgtgactgatccaagccaagtgagccatggcactggcttcacgtcctttggcttactcaaactctga

SEQ ID NO: 6049 - protein, 775 aa, Artificial Sequence
  source: /note="Description of Artificial Sequence: Synthetic Construct"
MSHHWGYGKHNGPEHWHKDFPIAKGERQSPVDIDTHTAKYDPSLKPLSVSYDQATSLRILNNGHAFNVEFDDSQDKAVLKGGPLDGTYRLIQFHFHWGSLDGQGSEHTVDKKKYAAELHLVHWNTKYGDFGKAVQQPDGLAVLGIFLKVGSAKPGHQKVVDVLDSIKTKGKSADFTNFDPRGLLPESLDYWTYPGSLTTPPLLECVTWIVLKEPISVSSEQVLKFRKLNFNGEGEPEELMVDNWRPAQPLKNRQIKASFKGGSMVSKGEELFTGVVPILVELDGDVNGHKFSVSGEGEGDATYGKLTLKFICTTGKLPVPWPTLVTTLTYGVQCFSRYPDHMKQHDFFKSAMPEGYVQERTIFFKDDGNYKTRAEVKFEGDTLVNRIELKGIDFKEDGNILGHKLEYNYNSHNVYIMADKQKNGIKVNFKIRHNIEDGSVQLADHYQQNTPIGDGPVLLPDNHYLSTQSKLSKDPNEKRDHMVLLEFVTAAGITLGMDELYKGGSGGGSGGGSGMIETYNQTSPRSAATGLPISMKIFMYLLTVFLITQMIGSALFAVYLHRRLDKIEDERNLHEDFVFMKTIQRCNTGERSLSLLNCEEIKSQFEGFVKDIMLNKEETKKENSFEMQKGDQNPQIAAHVISEASSKTTSVLQWAEKGYYTMSNNLVTLENGKQLTVKRQGLYYIYAQVTFCSNREASSQAPFIASLCLKSPGRFERILLRAANTHSSAKPCGQQSIHLGGVFELQPGASVFVNVTDPSQVSHGTGFTSFGLLKL

SEQ ID NO: 6050 - DNA, 2328 bp, Artificial Sequence
  source: /note="Description of Artificial Sequence: Synthetic Construct"
atgtcccatcactgggggtacggcaaacacaacggacctgagcactggcataaggacttccccattgccaagggagagcgccagtcccctgttgacatcgacactcatacagccaagtatgacccttccctgaagcccctgtctgtttcctatgatcaagcaacttccctgagaatcctcaacaatggtcatgctttcaacgtggagtttgatgactctcaggacaaagcagtgctcaagggaggacccctggatggcacttacagattgattcagtttcactttcactggggttcacttgatggacaaggttcagagcatactgtggataaaaagaaatatgctgcagaacttcacttggttcactggaacaccaaatatggggattttgggaaagctgtgcagcaacctgatggactggccgttctaggtatttttttgaaggttggcagcgctaaaccgggccatcagaaagttgttgatgtgctggattccattaaaacaaagggcaagagtgctgacttcactaacttcgatcctcgtggcctccttcctgaatccctggattactggacctacccaggctcactgaccacccctcctcttctggaatgtgtgacctggattgtgctcaaggaacccatcagcgtcagcagcgagcaggtgttgaaattccgtaaacttaacttcaatggggagggtgaacccgaagaactgatggtggacaactggcgcccagctcagccactgaagaacaggcaaatcaaagcttccttcaaaggaggatccatggtgagcaagggcgaggagctgttcaccggggtggtgcccatcctggtcgagctggacggcgacgtaaacggccacaagttcagcgtgtccggcgagggcgagggcgatgccacctacggcaagctgaccctgaagttcatctgcaccaccggcaagctgcccgtgccctggcccaccctcgtgaccaccctgacctacggcgtgcagtgcttcagccgctaccccgaccacatgaagcagcacgacttcttcaagtccgccatgcccgaaggctacgtccaggagcgcaccatcttcttcaaggacgacggcaactacaagacccgcgccgaggtgaagttcgagggcgacaccctggtgaaccgcatcgagctgaagggcatcgacttcaaggaggacggcaacatcctggggcacaagctggagtacaactacaacagccacaacgtctatatcatggccgacaagcagaagaacggcatcaaggtgaacttcaagatccgccacaacatcgaggacggcagcgtgcagctcgccgaccactaccagcagaacacccccatcggcgacggccccgtgctgctgcccgacaaccactacctgagcacccagtccaagctgagcaaagaccccaacgagaagcgcgatcacatggtcctgctggagttcgtgaccgccgccgggatcactctcggcatggacgagctgtacaagggtggatccggaggtggaagtggaggtggatctggtatgatcgaaacatacaaccaaacttctccccgatctgcggccactggactgcccatcagcatgaaaatttttatgtatttacttactgtttttcttatcacccagatgattgggtcagcactttttgctgtgtatcttcatagaaggttggacaagatagaagatgaaaggaatcttcatgaagattttgtattcatgaaaacgatacagagatgcaacacaggagaaagatccttatccttactgaactgtgaggagattaaaagccagtttgaaggctttgtgaaggatataatgttaaacaaagaggagacgaagaaagaaaacagctttgaaatgcaaaaaggtgatcagaatcctcaaattgcggcacatgtcataagtgaggccagcagtaaaacaacatctgtgttacagtgggctgaaaaaggatactacaccatgagcaacaacttggtaaccctggaaaatgggaaacagctgaccgttaaaagacaaggactctattatatctatgcccaagtcaccttctgttccaatcgggaagcttcgagtcaagctccatttatagccagcctctgcctaaagtcccccggtagattcgagagaatcttactcagagctgcaaatacccacagttccgccaaaccttgcgggcaacaatccattcacttgggaggagtatttgaattgcaaccaggtgcttcggtgtttgtcaatgtgactgatccaagccaagtgagccatggcactggcttcacgtcctttggcttactcaaactctga

SEQ ID NO: 6051 - protein, 553 aa, Artificial Sequence
  source: /note="Description of Artificial Sequence: Synthetic Construct"
MSHHWGYGKHNGPEHWHKDFPIAKGERQSPVDIDTHTAKYDPSLKPLSVSYDQATSLRILNNGHAFNVEFDDSQDKAVLKGGPLDGTYRLIQFHFHWGSLDGQGSEHTVDKKKYAAELHLVHWNTKYGDFGKAVQQPDGLAVLGIFLKVGSAKPGHQKVVDVLDSIKTKGKSADFTNFDPRGLLPESLDYWTYPGSLTTPPLLECVTWIVLKEPISVSSEQVLKFRKLNFNGEGEPEELMVDNWRPAQPLKNRQIKASFKGGSDYKDDDDKGGSGGGSGGGSGMIETYNQTSPRSAATGLPISMKIFMYLLTVFLITQMIGSALFAVYLHRRLDKIEDERNLHEDFVFMKTIQRCNTGERSLSLLNCEEIKSQFEGFVKDIMLNKEETKKENSFEMQKGDQNPQIAAHVISEASSKTTSVLQWAEKGYYTMSNNLVTLENGKQLTVKRQGLYYIYAQVTFCSNREASSQAPFIASLCLKSPGRFERILLRAANTHSSAKPCGQQSIHLGGVFELQPGASVFVNVTDPSQVSHGTGFTSFGLLKLYPYDVPDYA

SEQ ID NO: 6052 - DNA, 1662 bp, Artificial Sequence
  source: /note="Description of Artificial Sequence: Synthetic Construct"
atgtcccatcactgggggtacggcaaacacaacggacctgagcactggcataaggacttccccattgccaagggagagcgccagtcccctgttgacatcgacactcatacagccaagtatgacccttccctgaagcccctgtctgtttcctatgatcaagcaacttccctgagaatcctcaacaatggtcatgctttcaacgtggagtttgatgactctcaggacaaagcagtgctcaagggaggacccctggatggcacttacagattgattcagtttcactttcactggggttcacttgatggacaaggttcagagcatactgtggataaaaagaaatatgctgcagaacttcacttggttcactggaacaccaaatatggggattttgggaaagctgtgcagcaacctgatggactggccgttctaggtatttttttgaaggttggcagcgctaaaccgggccatcagaaagttgttgatgtgctggattccattaaaacaaagggcaagagtgctgacttcactaacttcgatcctcgtggcctccttcctgaatccctggattactggacctacccaggctcactgaccacccctcctcttctggaatgtgtgacctggattgtgctcaaggaacccatcagcgtcagcagcgagcaggtgttgaaattccgtaaacttaacttcaatggggagggtgaacccgaagaactgatggtggacaactggcgcccagctcagccactgaagaacaggcaaatcaaagcttccttcaaaggaggatccgactacaaagacgatgacgacaagggaggttctggtggtggtagtggaggaggatcaggtatgatcgaaacatacaaccaaacttctccccgatctgcggccactggactgcccatcagcatgaaaatttttatgtatttacttactgtttttcttatcacccagatgattgggtcagcactttttgctgtgtatcttcatagaaggttggacaagatagaagatgaaaggaatcttcatgaagattttgtattcatgaaaacgatacagagatgcaacacaggagaaagatccttatccttactgaactgtgaggagattaaaagccagtttgaaggctttgtgaaggatataatgttaaacaaagaggagacgaagaaagaaaacagctttgaaatgcaaaaaggtgatcagaatcctcaaattgcggcacatgtcataagtgaggccagcagtaaaacaacatctgtgttacagtgggctgaaaaaggatactacaccatgagcaacaacttggtaaccctggaaaatgggaaacagctgaccgttaaaagacaaggactctattatatctatgcccaagtcaccttctgttccaatcgggaagcttcgagtcaagctccatttatagccagcctctgcctaaagtcccccggtagattcgagagaatcttactcagagctgcaaatacccacagttccgccaaaccttgcgggcaacaatccattcacttgggaggagtatttgaattgcaaccaggtgcttcggtgtttgtcaatgtgactgatccaagccaagtgagccatggcactggcttcacgtcctttggcttactcaaactctacccatacgatgttccagattacgcttga

SEQ ID NO: 6053 - protein, 1043 aa, Artificial Sequence
  source: /note="Description of Artificial Sequence: Synthetic Construct"
MALPVTALLLPLALLLHAARPDIQMTQTTSSLSASLGDRVTISCRASQDISKYLNWYQQKPDGTVKLLIYHTSRLHSGVPSRFSGSGSGTDYSLTISNLEQEDIATYFCQQGNTLPYTFGGGTKLEITGGGGSGGGGSGGGGSEVKLQESGPGLVAPSQSLSVTCTVSGVSLPDYGVSWIRQPPRKGLEWLGVIWGSETTYYNSALKSRLTIIKDNSKSQVFLKMNSLQTDDTAIYYCAKHYYYGGSYAMDYWGQGTSVTVSSTTTPAPRPPTPAPTIASQPLSLRPEACRPAAGGAVHTRGLDFACDIYIWAPLAGTCGVLLLSLVITLYCKRGRKKLLYIFKQPFMRPVQTTQEEDGCSCRFPEEEEGGCELRVKFSRSADAPAYKQGQNQLYNELNLGRREEYDVLDKRRGRDPEMGGKPRRKNPQEGLYNELQKDKMAEAYSEIGMKGERRRGKGHDGLYQGLSTATKDTYDALHMQALPPRGSGATNFSLLKQAGDVEENPGPGSMSHHWGYGKHNGPEHWHKDFPIAKGERQSPVDIDTHTAKYDPSLKPLSVSYDQATSLRILNNGHAFNVEFDDSQDKAVLKGGPLDGTYRLIQFHFHWGSLDGQGSEHTVDKKKYAAELHLVHWNTKYGDFGKAVQQPDGLAVLGIFLKVGSAKPGHQKVVDVLDSIKTKGKSADFTNFDPRGLLPESLDYWTYPGSLTTPPLLECVTWIVLKEPISVSSEQVLKFRKLNFNGEGEPEELMVDNWRPAQPLKNRQIKASFKGGSGGGSGGGSGMIETYNQTSPRSAATGLPISMKIFMYLLTVFLITQMIGSALFAVYLHRRLDKIEDERNLHEDFVFMKTIQRCNTGERSLSLLNCEEIKSQFEGFVKDIMLNKEETKKENSFEMQKGDQNPQIAAHVISEASSKTTSVLQWAEKGYYTMSNNLVTLENGKQLTVKRQGLYYIYAQVTFCSNREASSQAPFIASLCLKSPGRFERILLRAANTHSSAKPCGQQSIHLGGVFELQPGASVFVNVTDPSQVSHGTGFTSFGLLKL

SEQ ID NO: 6054 - DNA, 3132 bp, Artificial Sequence
  source: /note="Description of Artificial Sequence: Synthetic Construct"
atggccttaccagtgaccgccttgctcctgccgctggccttgctgctccacgccgccaggccggacatccagatgacacagactacatcctccctgtctgcctctctgggagacagagtcaccatcagttgcagggcaagtcaggacattagtaaatatttaaattggtatcagcagaaaccagatggaactgttaaactcctgatctaccatacatcaagattacactcaggagtcccatcaaggttcagtggcagtgggtctggaacagattattctctcaccattagcaacctggagcaagaagatattgccacttacttttgccaacagggtaatacgcttccgtacacgttcggaggggggaccaagctggagatcacaggtggcggtggctcgggcggtggtgggtcgggtggcggcggatctgaggtgaaactgcaggagtcaggacctggcctggtggcgccctcacagagcctgtccgtcacatgcactgtctcaggggtctcattacccgactatggtgtaagctggattcgccagcctccacgaaagggtctggagtggctgggagtaatatggggtagtgaaaccacatactataattcagctctcaaatccagactgaccatcatcaaggacaactccaagagccaagttttcttaaaaatgaacagtctgcaaactgatgacacagccatttactactgtgccaaacattattactacggtggtagctatgctatggactactggggccaaggaacctcagtcaccgtctcctcaaccacgacgccagcgccgcgaccaccaacaccggcgcccaccatcgcgtcgcagcccctgtccctgcgcccagaggcgtgccggccagcggcggggggcgcagtgcacacgagggggctggacttcgcctgtgatatctacatctgggcgcccttggccgggacttgtggggtccttctcctgtcactggttatcaccctttactgcaaacggggcagaaagaaactcctgtatatattcaaacaaccatttatgagaccagtacaaactactcaagaggaagatggctgtagctgccgatttccagaagaagaagaaggaggatgtgaactgagagtgaagttcagcaggagcgcagacgcccccgcgtacaagcagggccagaaccagctctataacgagctcaatctaggacgaagagaggagtacgatgttttggacaagagacgtggccgggaccctgagatggggggaaagccgagaaggaagaaccctcaggaaggcctgtacaatgaactgcagaaagataagatggcggaggcctacagtgagattgggatgaaaggcgagcgccggaggggcaaggggcacgatggcctttaccagggtctcagtacagccaccaaggacacctacgacgcccttcacatgcaggccctgccccctcgcggatcaggagctactaacttcagcctgctgaagcaggctggagacgtggaggagaaccctggacctggatccatgtcccatcactgggggtacggcaaacacaacggacctgagcactggcataaggacttccccattgccaagggagagcgccagtcccctgttgacatcgacactcatacagccaagtatgacccttccctgaagcccctgtctgtttcctatgatcaagcaacttccctgagaatcctcaacaatggtcatgctttcaacgtggagtttgatgactctcaggacaaagcagtgctcaagggaggacccctggatggcacttacagattgattcagtttcactttcactggggttcacttgatggacaaggttcagagcatactgtggataaaaagaaatatgctgcagaacttcacttggttcactggaacaccaaatatggggattttgggaaagctgtgcagcaacctgatggactggccgttctaggtatttttttgaaggttggcagcgctaaaccgggccatcagaaagttgttgatgtgctggattccattaaaacaaagggcaagagtgctgacttcactaacttcgatcctcgtggcctccttcctgaatccctggattactggacctacccaggctcactgaccacccctcctcttctggaatgtgtgacctggattgtgctcaaggaacccatcagcgtcagcagcgagcaggtgttgaaattccgtaaacttaacttcaatggggagggtgaacccgaagaactgatggtggacaactggcgcccagctcagccactgaagaacaggcaaatcaaagcttccttcaaaggaggatccggaggtggaagtggaggtggatctggtatgatcgaaacatacaaccaaacttctccccgatctgcggccactggactgcccatcagcatgaaaatttttatgtatttacttactgtttttcttatcacccagatgattgggtcagcactttttgctgtgtatcttcatagaaggttggacaagatagaagatgaaaggaatcttcatgaagattttgtattcatgaaaacgatacagagatgcaacacaggagaaagatccttatccttactgaactgtgaggagattaaaagccagtttgaaggctttgtgaaggatataatgttaaacaaagaggagacgaagaaagaaaacagctttgaaatgcaaaaaggtgatcagaatcctcaaattgcggcacatgtcataagtgaggccagcagtaaaacaacatctgtgttacagtgggctgaaaaaggatactacaccatgagcaacaacttggtaaccctggaaaatgggaaacagctgaccgttaaaagacaaggactctattatatctatgcccaagtcaccttctgttccaatcgggaagcttcgagtcaagctccatttatagccagcctctgcctaaagtcccccggtagattcgagagaatcttactcagagctgcaaatacccacagttccgccaaaccttgcgggcaacaatccattcacttgggaggagtatttgaattgcaaccaggtgcttcggtgtttgtcaatgtgactgatccaagccaagtgagccatggcactggcttcacgtcctttggcttactcaaactctaa

SEQ ID NO: 6055 - protein, 772 aa, Artificial Sequence
  source: /note="Description of Artificial Sequence: Synthetic Construct"
MALPVTALLLPLALLLHAARPDIQMTQTTSSLSASLGDRVTISCRASQDISKYLNWYQQKPDGTVKLLIYHTSRLHSGVPSRFSGSGSGTDYSLTISNLEQEDIATYFCQQGNTLPYTFGGGTKLEITGGGGSGGGGSGGGGSEVKLQESGPGLVAPSQSLSVTCTVSGVSLPDYGVSWIRQPPRKGLEWLGVIWGSETTYYNSALKSRLTIIKDNSKSQVFLKMNSLQTDDTAIYYCAKHYYYGGSYAMDYWGQGTSVTVSSTTTPAPRPPTPAPTIASQPLSLRPEACRPAAGGAVHTRGLDFACDIYIWAPLAGTCGVLLLSLVITLYCKRGRKKLLYIFKQPFMRPVQTTQEEDGCSCRFPEEEEGGCELRVKFSRSADAPAYKQGQNQLYNELNLGRREEYDVLDKRRGRDPEMGGKPRRKNPQEGLYNELQKDKMAEAYSEIGMKGERRRGKGHDGLYQGLSTATKDTYDALHMQALPPRGSATNFSLLKQAGDVEENPGPGSMHMIETYNQTSPRSAATGLPISMKIFMYLLTVFLITQMIGSALFAVYLHRRLDKIEDERNLHEDFVFMKTIQRCNTGERSLSLLNCEEIKSQFEGFVKDIMLNKEETKKENSFEMQKGDQNPQIAAHVISEASSKTTSVLQWAEKGYYTMSNNLVTLENGKQLTVKRQGLYYIYAQVTFCSNREASSQAPFIASLCLKSPGRFERILLRAANTHSSAKPCGQQSIHLGGVFELQPGASVFVNVTDPSQVSHGTGFTSFGLLKL

SEQ ID NO: 6056 - DNA, 2319 bp, Artificial Sequence
  source: /note="Description of Artificial Sequence: Synthetic Construct"
atggccttaccagtgaccgccttgctcctgccgctggccttgctgctccacgccgccaggccggacatccagatgacacagactacatcctccctgtctgcctctctgggagacagagtcaccatcagttgcagggcaagtcaggacattagtaaatatttaaattggtatcagcagaaaccagatggaactgttaaactcctgatctaccatacatcaagattacactcaggagtcccatcaaggttcagtggcagtgggtctggaacagattattctctcaccattagcaacctggagcaagaagatattgccacttacttttgccaacagggtaatacgcttccgtacacgttcggaggggggaccaagctggagatcacaggtggcggtggctcgggcggtggtgggtcgggtggcggcggatctgaggtgaaactgcaggagtcaggacctggcctggtggcgccctcacagagcctgtccgtcacatgcactgtctcaggggtctcattacccgactatggtgtaagctggattcgccagcctccacgaaagggtctggagtggctgggagtaatatggggtagtgaaaccacatactataattcagctctcaaatccagactgaccatcatcaaggacaactccaagagccaagttttcttaaaaatgaacagtctgcaaactgatgacacagccatttactactgtgccaaacattattactacggtggtagctatgctatggactactggggccaaggaacctcagtcaccgtctcctcaaccacgacgccagcgccgcgaccaccaacaccggcgcccaccatcgcgtcgcagcccctgtccctgcgcccagaggcgtgccggccagcggcggggggcgcagtgcacacgagggggctggacttcgcctgtgatatctacatctgggcgcccttggccgggacttgtggggtccttctcctgtcactggttatcaccctttactgcaaacggggcagaaagaaactcctgtatatattcaaacaaccatttatgagaccagtacaaactactcaagaggaagatggctgtagctgccgatttccagaagaagaagaaggaggatgtgaactgagagtgaagttcagcaggagcgcagacgcccccgcgtacaagcagggccagaaccagctctataacgagctcaatctaggacgaagagaggagtacgatgttttggacaagagacgtggccgggaccctgagatggggggaaagccgagaaggaagaaccctcaggaaggcctgtacaatgaactgcagaaagataagatggcggaggcctacagtgagattgggatgaaaggcgagcgccggaggggcaaggggcacgatggcctttaccagggtctcagtacagccaccaaggacacctacgacgcccttcacatgcaggccctgccccctcgcggatcagctactaacttcagcctgctgaagcaggctggagacgtggaggagaaccctggacctggatccatgcatatgatcgaaacatacaaccaaacttctccccgatctgcggccactggactgcccatcagcatgaaaatttttatgtatttacttactgtttttcttatcacccagatgattgggtcagcactttttgctgtgtatcttcatagaaggttggacaagatagaagatgaaaggaatcttcatgaagattttgtattcatgaaaacgatacagagatgcaacacaggagaaagatccttatccttactgaactgtgaggagattaaaagccagtttgaaggctttgtgaaggatataatgttaaacaaagaggagacgaagaaagaaaacagctttgaaatgcaaaaaggtgatcagaatcctcaaattgcggcacatgtcataagtgaggccagcagtaaaacaacatctgtgttacagtgggctgaaaaaggatactacaccatgagcaacaacttggtaaccctggaaaatgggaaacagctgaccgttaaaagacaaggactctattatatctatgcccaagtcaccttctgttccaatcgggaagcttcgagtcaagctccatttatagccagcctctgcctaaagtcccccggtagattcgagagaatcttactcagagctgcaaatacccacagttccgccaaaccttgcgggcaacaatccattcacttgggaggagtatttgaattgcaaccaggtgcttcggtgtttgtcaatgtgactgatccaagccaagtgagccatggcactggcttcacgtcctttggcttactcaaactctga

SEQ ID NO: 6057-6066 - skipped (10 entries)

SEQ ID NO: 6067 - protein, 263 aa, Artificial Sequence
  source: /note="Description of Artificial Sequence: Synthetic Construct"
MHMIETYNQTSPRSAATGLPISMKIFMYLLTVFLITQMIGSALFAVYLHRRLDKIEDERNLHEDFVFMKTIQRCNTGERSLSLLNCEEIKSQFEGFVKDIMLNKEETKKENSFEMQKGDQNPQIAAHVISEASSKTTSVLQWAEKGYYTMSNNLVTLENGKQLTVKRQGLYYIYAQVTFCSNREASSQAPFIASLCLKSPGRFERILLRAANTHSSAKPCGQQSIHLGGVFELQPGASVFVNVTDPSQVSHGTGFTSFGLLKL

SEQ ID NO: 6068 - DNA, 792 bp, Artificial Sequence
  source: /note="Description of Artificial Sequence: Synthetic Construct"
atgcatatgatcgaaacatacaaccaaacttctccccgatctgcggccactggactgcccatcagcatgaaaatttttatgtatttacttactgtttttcttatcacccagatgattgggtcagcactttttgctgtgtatcttcatagaaggttggacaagatagaagatgaaaggaatcttcatgaagattttgtattcatgaaaacgatacagagatgcaacacaggagaaagatccttatccttactgaactgtgaggagattaaaagccagtttgaaggctttgtgaaggatataatgttaaacaaagaggagacgaagaaagaaaacagctttgaaatgcaaaaaggtgatcagaatcctcaaattgcggcacatgtcataagtgaggccagcagtaaaacaacatctgtgttacagtgggctgaaaaaggatactacaccatgagcaacaacttggtaaccctggaaaatgggaaacagctgaccgttaaaagacaaggactctattatatctatgcccaagtcaccttctgttccaatcgggaagcttcgagtcaagctccatttatagccagcctctgcctaaagtcccccggtagattcgagagaatcttactcagagctgcaaatacccacagttccgccaaaccttgcgggcaacaatccattcacttgggaggagtatttgaattgcaaccaggtgcttcggtgtttgtcaatgtgactgatccaagccaagtgagccatggcactggcttcacgtcctttggcttactcaaactctga

SEQ ID NO: 6069 - protein, 261 aa, Artificial Sequence
  Description of Artificial Sequence: Synthetic Construct
MIETYNQTSPRSAATGLPISMKIFMYLLTVFLITQMIGSALFAVYLHRRLDKIEDERNLHEDFVFMKTIQRCNTGERSLSLLNCEEIKSQFEGFVKDIMLNKEETKKENGGSGGSGDQNPQIAAHVISEASSKTTSVLQWAEKGYYTMSNNLVTLENGKQLTVKRQGLYYIYAQVTFCSNREASSQAPFIASLCLKSPGRFERILLRAANTHSSAKPCGQQSIHLGGVFELQPGASVFVNVTDPSQVSHGTGFTSFGLLKL

SEQ ID NO: 6070 - DNA, 783 bp, Artificial Sequence
  Description of Artificial Sequence: Synthetic Construct
atgatcgaaacatacaaccaaacttctccccgatctgcggccactggactgcccatcagcatgaaaatttttatgtatttacttactgtttttcttatcacccagatgattgggtcagcactttttgctgtgtatcttcatagaaggttggacaagatagaagatgaaaggaatcttcatgaagattttgtattcatgaaaacgatacagagatgcaacacaggagaaagatccttatccttactgaactgtgaggagattaaaagccagtttgaaggctttgtgaaggatataatgttaaacaaagaggagacgaagaaagaaaacggtggaagtggtggaagtggtgatcagaatcctcaaattgcggcacatgtcataagtgaggccagcagtaaaacaacatctgtgttacagtgggctgaaaaaggatactacaccatgagcaacaacttggtaaccctggaaaatgggaaacagctgaccgttaaaagacaaggactctattatatctatgcccaagtcaccttctgttccaatcgggaagcttcgagtcaagctccatttatagccagcctctgcctaaagtcccccggtagattcgagagaatcttactcagagctgcaaatacccacagttccgccaaaccttgcgggcaacaatccattcacttgggaggagtatttgaattgcaaccaggtgcttcggtgtttgtcaatgtgactgatccaagccaagtgagccatggcactggcttcacgtcctttggcttactcaaactc

SEQ ID NO: 6071 - protein, 533 aa, Artificial Sequence
  Description of Artificial Sequence: Synthetic Construct
MSHHWGYGKHNGPEHWHKDFPIAKGERQSPVDIDTHTAKYDPSLKPLSVSYDQATSLRILNNGHAFNVEFDDSQDKAVLKGGPLDGTYRLIQFHFHWGSLDGQGSEHTVDKKKYAAELHLVHWNTKYGDFGKAVQQPDGLAVLGIFLKVGSAKPGHQKVVDVLDSIKTKGKSADFTNFDPRGLLPESLDYWTYPGSLTTPPLLECVTWIVLKEPISVSSEQVLKFRKLNFNGEGEPEELMVDNWRPAQPLKNRQIKASFKGGSGGGSGGGSGMIETYNQTSPRSAATGLPISMKIFMYLLTVFLITQMIGSALFAVYLHRRLDKIEDERNLHEDFVFMKTIQRCNTGERSLSLLNCEEIKSQFEGFVKDIMLNKEETKKENGGSGGSGDQNPQIAAHVISEASSKTTSVLQWAEKGYYTMSNNLVTLENGKQLTVKRQGLYYIYAQVTFCSNREASSQAPFIASLCLKSPGRFERILLRAANTHSSAKPCGQQSIHLGGVFELQPGASVFVNVTDPSQVSHGTGFTSFGLLKL

SEQ ID NO: 6072 - DNA, 1602 bp, Artificial Sequence
  Description of Artificial Sequence: Synthetic Construct
atgtcccatcactgggggtacggcaaacacaacggacctgagcactggcataaggacttccccattgccaagggagagcgccagtcccctgttgacatcgacactcatacagccaagtatgacccttccctgaagcccctgtctgtttcctatgatcaagcaacttccctgagaatcctcaacaatggtcatgctttcaacgtggagtttgatgactctcaggacaaagcagtgctcaagggaggacccctggatggcacttacagattgattcagtttcactttcactggggttcacttgatggacaaggttcagagcatactgtggataaaaagaaatatgctgcagaacttcacttggttcactggaacaccaaatatggggattttgggaaagctgtgcagcaacctgatggactggccgttctaggtatttttttgaaggttggcagcgctaaaccgggccatcagaaagttgttgatgtgctggattccattaaaacaaagggcaagagtgctgacttcactaacttcgatcctcgtggcctccttcctgaatccctggattactggacctacccaggctcactgaccacccctcctcttctggaatgtgtgacctggattgtgctcaaggaacccatcagcgtcagcagcgagcaggtgttgaaattccgtaaacttaacttcaatggggagggtgaacccgaagaactgatggtggacaactggcgcccagctcagccactgaagaacaggcaaatcaaagcttccttcaaaggaggatccggaggtggaagtggaggtggatctggtatgatcgaaacatacaaccaaacttctccccgatctgcggccactggactgcccatcagcatgaaaatttttatgtatttacttactgtttttcttatcacccagatgattgggtcagcactttttgctgtgtatcttcatagaaggttggacaagatagaagatgaaaggaatcttcatgaagattttgtattcatgaaaacgatacagagatgcaacacaggagaaagatccttatccttactgaactgtgaggagattaaaagccagtttgaaggctttgtgaaggatataatgttaaacaaagaggagacgaagaaagaaaacggtggaagtggtggaagtggtgatcagaatcctcaaattgcggcacatgtcataagtgaggccagcagtaaaacaacatctgtgttacagtgggctgaaaaaggatactacaccatgagcaacaacttggtaaccctggaaaatgggaaacagctgaccgttaaaagacaaggactctattatatctatgcccaagtcaccttctgttccaatcgggaagcttcgagtcaagctccatttatagccagcctctgcctaaagtcccccggtagattcgagagaatcttactcagagctgcaaatacccacagttccgccaaaccttgcgggcaacaatccattcacttgggaggagtatttgaattgcaaccaggtgcttcggtgtttgtcaatgtgactgatccaagccaagtgagccatggcactggcttcacgtcctttggcttactcaaactctga

SEQ ID NO: 6073 - protein, 259 aa, Artificial Sequence
  source: /note="Description of Artificial Sequence: Synthetic Destabilizing Domain (DD)"
SHHWGYGKHNGPEHWHKDFPIAKGERQSPVDIDTHTAKYDPSLKPLSVSYDQATSLRILNNGHAFNVEFDDSQDKAVLKGGPLDGTYRLIQFHFHWGSLDGQGSDHTVDKKKYAAELHLVHWNTKYGDFGKAVQQPDGLAVLGIFLKVGSAKPGLQKVVDVLDSIKTKGKSADFTNFDPRGLLPESLDYWTYPGSLTTPPLLECVTWIVLKEPISVSSEQVLKFRKLNFNGEGEPEELMVDNWRPAQPLKNRQIKASFK

SEQ ID NO: 6074 - protein, 259 aa, Artificial Sequence; identical to SEQ ID NO: 5757
  source: /note="Description of Artificial Sequence: Synthetic Destabilizing Domain (DD)"

SEQ ID NO: 6075 - protein, 259 aa, Artificial Sequence; identical to SEQ ID NO: 5879
  source: /note="Description of Artificial Sequence: Synthetic Destabilizing Domain (DD)"

SEQ ID NO: 6076 - protein, 259 aa, Artificial Sequence; identical to SEQ ID NO: 5875
  source: /note="Description of Artificial Sequence: Synthetic Destabilizing Domain (DD)"

SEQ ID NO: 6077 - protein, 259 aa, Artificial Sequence; identical to SEQ ID NO: 5759
  source: /note="Description of Artificial Sequence: Synthetic Destabilizing Domain (DD)"

SEQ ID NO: 6078 - protein, 259 aa, Artificial Sequence; identical to SEQ ID NO: 5821
  source: /note="Description of Artificial Sequence: Synthetic Destabilizing Domain (DD)"

SEQ ID NO: 6079 - protein, 259 aa, Artificial Sequence
  source: /note="Description of Artificial Sequence: Synthetic Destabilizing Domain (DD)"
SHHWGYGKHNGPEHWHKDFPIAKGERQSPVDIDTHTAKYDPSLKPLSVSYDQATSLRNLNNGHAFNVEFDDSQDKAVLKGGPLDGTYRLIQFHFHWGSLDGQGSEHTVDKKKYAAELHLVHWNTKYGDFGKAVQQPDGLAVLGIFLKVGSAKPGLQKVVDVLDSIKTKGKSADFTNFDPRGLLPESLDYWTYPGSLTTPPLLECVTWIVLKEPISVSSEQVLKFRKLNFNGEGEPEELMVDNWRPAQPLKNRQIKASFK

SEQ ID NO: 6080 - protein, 259 aa, Artificial Sequence
  source: /note="Description of Artificial Sequence: Synthetic Destabilizing Domain (DD)"
SHHWGYGKHNGPEHWHKDFPIAKGERQSPVDIDTHTAKYDPSLKPLSVSYDQATSLRILNNDHAFNVEFDDSQDKAVLKGGPLDGTYRLIQFHFHWGSLDGQGSEHTVDKKKYAAELHLVHWNTKYGDFGKAVQQPDGLAVLGIFLKVGSAKPGLQKVVDVLDSIKTKGKSADFTNFDPRGLLPESLDYWTYPGSLTTPPLLECVTWIVLKEPISVSSEQVLKFRKLNFNGEGEPEELMVDNWRPAQPLKNRQIKASFK

SEQ ID NO: 6081 - protein, 259 aa, Artificial Sequence
  source: /note="Description of Artificial Sequence: Synthetic Destabilizing Domain (DD)"
SHHWGYGKHNGPEHWHKDFPIAKGERQSPVDIDTHTAKYDPSLKPLSVSYDQATSLRILNNGHAFNVEFDDSQDKAVLKGGPLDGTYRLIQFHFHWGSLDGQGSEHTVDKKKYAAELHLVYWNTKYGDFGKAVQQPDGLAVLGIFLKVGSAKPGLQKVVDVLDSIKTKGKSADFTNFDPRGLLPESLDYWTYPGSLTTPPLLECVTWIVLKEPISVSSEQVLKFRKLNFNGEGEPEELMVDNWRPAQPLKNRQIKASFK

SEQ ID NO: 6082 - protein, 259 aa, Artificial Sequence; identical to SEQ ID NO: 5737
  source: /note="Description of Artificial Sequence: Synthetic Destabilizing Domain (DD)"

SEQ ID NO: 6083 - protein, 259 aa, Artificial Sequence; identical to SEQ ID NO: 5673
  source: /note="Description of Artificial Sequence: Synthetic Destabilizing Domain (DD)"

SEQ ID NO: 6084 - protein, 259 aa, Artificial Sequence; identical to SEQ ID NO: 5693
  source: /note="Description of Artificial Sequence: Synthetic Destabilizing Domain (DD)"

SEQ ID NO: 6085 - protein, 259 aa, Artificial Sequence; identical to SEQ ID NO: 5759
  source: /note="Description of Artificial Sequence: Synthetic Destabilizing Domain (DD)"

SEQ ID NO: 6086 - protein, 259 aa, Artificial Sequence
  source: /note="Description of Artificial Sequence: Synthetic Destabilizing Domain (DD)"
SHHWGYGKHNGPEHWHKDFPIAKGELQSPVDIDTHTAKYDPSLKPLSVSYDQATSLRILNNGHAFNVEFDDSQDKAVLKGGPLDGTYRLIQFHFHWGSLDGQGSEHTVDKKKYAAELHLVYWNTKYGDFGKAVQQPDGLAVLGIFLKVGSAKPGLQKVVDVLDSIKTKGKSADFTNFDPRGLLPESLDYWTYPGSLTTPPLLECVTWIVLKEPISVSSEQVLKFRKLNFNGEGEPEELMVDNWRPAQPLKNRQIKASFK

SEQ ID NO: 6087 - protein, 259 aa, Artificial Sequence
  source: /note="Description of Artificial Sequence: Synthetic Destabilizing Domain (DD)"
SHHWGYGKHNGPEHWHKDFPIAKGERQSPVDIDTHTAKYDPSLKPLSVSYDQATSLRILNNGHAFNVEFDDSQDKAVLKGGPLDGIYRLIQFHFHWGSLDGQGSEHTVDKKKYAAELHLVYWNTKYGDFGKAVQQPDGLAVLGIFLKVGSAKPGLQKVVDVLDSIKTKGKSADFTNFDPRGLLPESLDYWTYPGSLTTPPLLECVTWIVLKEPISVSSEQVLKFRKLNFNGEGEPEELMVDNWRPAQPLKNRQIKASFK

SEQ ID NO: 6088 - protein, 259 aa, Artificial Sequence
  source: /note="Description of Artificial Sequence: Synthetic Destabilizing Domain (DD)"
SHHWGYGKHNGPEHWHKDFPIAKGERQSPVDIDTHTAKYDPSLKPLSVSYDQATSLRILNNGHAFNVEFDDSQDKAVLKGGPLDGTYRLIQFHFHWGSLDGQGSEHTVDKKKYAAELHLVYWNTKYGDFGKAVQQPDGLAVLGIFLKVGSAKPGLQKVVDVLDSIKTKGKSADFTNFDPRGLLPESLDYWTYPGSLTTPPLLECVTWIVLKEPISVSSEQVLKFRKLNFNGEGEPEELMVDNWRPAQPLKDRQIKASFK

SEQ ID NO: 6089 - protein, 259 aa, Artificial Sequence
  source: /note="Description of Artificial Sequence: Synthetic Destabilizing Domain (DD)"
SHHWGYGKHNGPEHWHKDFPIAKGERQSPVDIDTHTAKYDPSLKPLSVSYDQATSLRILNNGHAFNVEFDFSQDKAVLKGGPLDGTYRLIQFHFHWGSLDGQGSEHTVDKKKYAAELHLVHWNTKYGDFGKAVQQPDGLAVLGIFLKVGSAKPGLQKVVDVLDSIKTKGKSADFTNFDPRGLLPESLDYWTYPGSLTTPPLLECVTWIVLKEPISVSSEQVLKFRKLNFNGEGEPEELMFDNWRPAQPLKNRQIKASFK

SEQ ID NO: 6090 - protein, 259 aa, Artificial Sequence
  source: /note="Description of Artificial Sequence: Synthetic Destabilizing Domain (DD)"
SHHWGYGKHNGPEHWHKDFPIAKGERQSPVDIDTHTAKYDPSLKPLSVSYDQATSLRILNNGHAFNVEFDDSQDKAVLKGGPLDGTYRLIQFHFHWGSLDGQGSEHTVDKKKYAAELHLVHWNTKYGDFGKAVQQPDGLAVLGIFLKVGSAKPGLQKVVDVLDSIKTKGKSADFTNFDPRGLLPESLDYWTYPGSLTTPPLLECVTWIVLKEPISVSSEQVLKFRKLNFNGEGEPEELMFDNWRPAQLLKNRQIKASFK

SEQ ID NO: 6091 - protein, 259 aa, Artificial Sequence
  source: /note="Description of Artificial Sequence: Synthetic Destabilizing Domain (DD)"
SHHWGYGKHNGPEHWHKDFPIAKGERQSPVDIDTHTAKYDPSLKPLSVSYDQATSLRILNNGHAFNVEFDFSQDKAVLKGGPLDGTYRLIQFHFHWGSLDGQGSEHTVDKKKYAAELHLVHWNTKYGDFGKAVQQPDGLAVLGIFLKVGSAKPGLQKVVDVLDSIKTKGKSADFTNFDPRGLLPESLDYWTYPGSLTTPPLLECVTWIVLKEPISVSSEQVLKFRKLNFNGEGEPEELMVDNWRPAQLLKNRQIKASFK

SEQ ID NO: 6092 - protein, 259 aa, Artificial Sequence
  source: /note="Description of Artificial Sequence: Synthetic Destabilizing Domain (DD)"
SHHWGYGKHNGPEHWHKDFPIAKGERQSPVDIDTHTAKYDPSLKPLSVSYDQATSLRILNNGHAFNVEFLDSQDKAVLKGGPLDGNYRLIQFHFHWGSLDGQGSEHTVDKKKYAAELHLVHWNTKYGDFGKAVQQPDGLAVLGIFLKVGSAKPGLQKVVDVLDSIKTKGKSADFTNFDPRGLLPESLDYWTYPGSLTTPPLLECVTWIVLKEPISVSSEQVLKFRKLNFNGEGEPEELMVDNWRPAQPLKNRQIKASFK

SEQ ID NO: 6093 - protein, 259 aa, Artificial Sequence
  source: /note="Description of Artificial Sequence: Synthetic Destabilizing Domain (DD)"
SHHWGYGKHNGPEHWHKDFPIAKGERQSPVDIDTHTAKYDPSLKPLSVSYDQATSLRILNNGHAFNVEFLDSQDKAVLKGGPLDGTYRLIQFHFHWGSLDGQGSEHTVDKKKYAAELHLVHWNTKYGDFGKAVQQPDGLAVLGIFLKVGSAKPGLQKVVDVLDSIKTKGKSADFTNFDPRGLLPESLDYWTYPGSLTTPPLLECVTWIVLKEPISVSSEQVLKFRKLNFNGEGEPEELMVDNWRPAQPRKNRQIKASFK

SEQ ID NO: 6094 - protein, 259 aa, Artificial Sequence; identical to SEQ ID NO: 5659
  source: /note="Description of Artificial Sequence: Synthetic Destabilizing Domain (DD)"

SEQ ID NO: 6095 - protein, 259 aa, Artificial Sequence; identical to SEQ ID NO: 5721
  source: /note="Description of Artificial Sequence: Synthetic Destabilizing Domain (DD)"

SEQ ID NO: 6096 - protein, 259 aa, Artificial Sequence; identical to SEQ ID NO: 5677
  source: /note="Description of Artificial Sequence: Synthetic Destabilizing Domain (DD)"

SEQ ID NO: 6097 - protein, 259 aa, Artificial Sequence
  source: /note="Description of Artificial Sequence: Synthetic Destabilizing Domain (DD)"
SHHWGYGKHNGPEHWHKDFPIAKGERQSPVDIDTHTAKYDPSLKPLSVSYDQAKSLRILNNNHAFNVEFDDSQDKAVLKGGPLDGTYRLIQFHFHWGSLDGQGSEHTVDKKKYAAELHLVHWNTKYGDFGKAVQQPDGLAVLGIFLKVGSAKPGLQKVVDVLDSIKTKGKSADFTNFDPRGLLPESLDYWTYPGSLTTPPLLECVTWIVLKEPISVSSEQVLKFRKLNFNGEGEPEELMVDNWRPANPLKNRQIKASFK

SEQ ID NO: 6098 - protein, 259 aa, Artificial Sequence; identical to SEQ ID NO: 5688
  source: /note="Description of Artificial Sequence: Synthetic Destabilizing Domain (DD)"

SEQ ID NO: 6099 - protein, 259 aa, Artificial Sequence; identical to SEQ ID NO: 5666
  source: /note="Description of Artificial Sequence: Synthetic Destabilizing Domain (DD)"

SEQ ID NO: 6100 - protein, 259 aa, Artificial Sequence; identical to SEQ ID NO: 5743
  source: /note="Description of Artificial Sequence: Synthetic Destabilizing Domain (DD)"

SEQ ID NO: 6101 - protein, 259 aa, Artificial Sequence; identical to SEQ ID NO: 5691
  source: /note="Description of Artificial Sequence: Synthetic Destabilizing Domain (DD)"

SEQ ID NO: 6102 - protein, 259 aa, Artificial Sequence; identical to SEQ ID NO: 5739
  source: /note="Description of Artificial Sequence: Synthetic Destabilizing Domain (DD)"

SEQ ID NO: 6103 - protein, 255 aa, Artificial Sequence
  source: /note="Description of Artificial Sequence: Synthetic Destabilizing Domain (DD)"
SHHWGYGKHNGPEHWHKDFPIAKGERQSPVDIDTHTAKYDPSLKPLSVSYDQATSLRILNNGHAFNVEFDDSQDKAVLKGGPLDGTYRLIQFHFHWGSLDGQGSEHTVDKKKYAAELHLVHWNTKYGDFGKAVQQPDGLAVLGIFLKVGSAKPGHQKVVDVLDSIKTKGKSADFTNFDPRGLLPESLDYWTYPGSLTTPPLLECVTWIVLKEPISVSSEQVLKFRKLNFNGEGEPEELMVDNWRPAQPLKNRQIK

SEQ ID NO: 6104 - protein, 255 aa, Artificial Sequence
  source: /note="Description of Artificial Sequence: Synthetic Destabilizing Domain (DD)"
GYGKHNGPEHWHKDFPIAKGERQSPVDIDTHTAKYDPSLKPLSVSYDQATSLRILNNGHAFNVEFDDSQDKAVLKGGPLDGTYRLIQFHFHWGSLDGQGSEHTVDKKKYAAELHLVHWNTKYGDFGKAVQQPDGLAVLGIFLKVGSAKPGHQKVVDVLDSIKTKGKSADFTNFDPRGLLPESLDYWTYPGSLTTPPLLECVTWIVLKEPISVSSEQVLKFRKLNFNGEGEPEELMVDNWRPAQPLKNRQIKASFK

SEQ ID NO: 6105 - protein, 259 aa, Artificial Sequence
  source: /note="Description of Artificial Sequence: Synthetic Destabilizing Domain (DD)"
SHHYGYGKHNGPEHWHKDFPIAKGERQSPVDIDTHTAKYDPSLKPLSVSYDQATSLRILNNGHAFNVEFDDSQDKAVLKGGPLDGTYRLIQFHFHWGSLDGQGSEHTVDKKKYAAELHLVHWNTKYGDFGKAVQQPDGLAVLGIFLKVGSAKPGHQKVVDVLDSIKTKGKSADFTNFDPRGLLPESLDYWTYPGSLTTPPLLECVTWIVLKEPISVSSEQVLKFRKLNFNGEGEPEELMVDNWRPAQPLKNRQIKASFK

SEQ ID NO: 6106 - protein, 256 aa, Artificial Sequence
  source: /note="Description of Artificial Sequence: Synthetic Destabilizing Domain (DD)"
SHHWGYGKHNGPEHWHKDFPIAKGERQSPVDIDTHTAKYDPSLKPLSVSYDQATSLRILNNGHAFNVEFDDSQDKAVLKGGPLDGTYRLIQFHFHWGSLDGQGSEHTVDKKKYAAELHLVHWNTKYGDFGKAVQQPDGLAVLGIFLKVGSAKPGHQKVVDVLDSIKTKGKSADFTNFDPRGLLPESLDYWTYPGSLTTPPLLECVTWIVLKEPISVSSEQVLKFRKLNFNGEEELMVDNWRPAQPLKNRQIKASFK

SEQ ID NO: 6107 - protein, 259 aa, Artificial Sequence
  source: /note="Description of Artificial Sequence: Synthetic Destabilizing Domain (DD)"
SHHWGYGKHNGPEHWHKDFPIAKGERQSPVDIDTHTAKYDPSLKPLSVSYDQATSLRILNNGHAFNVEFDDSQDKAVLKGGPLDGTYRLIQFHFHWGSLDGQGSEHTVDKKKYAAELHLVHWNTKYGDFGKAVQQPDGLAVLGIFLKVGSAKPGHQKVVDVLDSIKTKGKSADFTNFDPRGLLPESLDYWTYPGSLTTPPLLECVTWIVLKEPISVSSEQVLKLRKLNFNGEGEPEELMVDNWRPAQPLKNRQIKASFK

SEQ ID NO: 6108 - protein, 259 aa, Artificial Sequence
  source: /note="Description of Artificial Sequence: Synthetic Destabilizing Domain (DD)"
SHHWGYGKHNGPEHWHKDFPIAKGERQSPVDIDTHTAKYDPSLKPLSVSYDQATSLRILNNGHAFNVEFNDSQNKAVLKGGPLDGTYRLIQFHFHWGSLNGQGSEHTVDKKKYAAELHLVHWNTKYGDFGKAVQQPDGLAVLGIFLKVGSAKPGHQKVVDVLDSIKTKGKSADFTNFDPRGLLPESLDYWTYPGSLTTPPLLECVTWIVLKEPISVSSEQVLKFRKLNFNGEGEPEELMVDNWRPAQPLKNRQIKASFK

SEQ ID NO: 6109 - DNA, 777 bp, Artificial Sequence
  source: /note="Description of Artificial Sequence: Synthetic Destabilizing Domain (DD)"
tcccatcactgggggtacggcaaacacaacggacctgagcactggcataaggacttccccattgccaagggagagcgccagtcccctgttgacatcgacactcatacagccaagtatgacccttccctgaagcccctgtctgtttcctatgatcaagcaacttccctgaggatcctcaacaatggtcatgctttcaacgtggagtttgatgactctcaggacaaagcagtgctcaagggaggacccctggatggcacttacagattgattcagtttcactttcactggggttcacttgatggacaaggttcagaccatactgtggataaaaagaaatatgctgcagaacttcacttggttcactggaacaccaaatatggggattttgggaaagctgtgcagcaacctgatggactggccgttctaggtatttttttgaaggttggcagcgctaaaccgggccttcagaaagttgttgatgtgctggattccattaaaacaaagggcaagagtgctgacttcactaacttcgatcctcgtggcctccttcctgaatccctggattactggacctacccaggctcactgaccacccctcctcttctggaatgtgtgacctggattgtgctcaaggaacccatcagcgtcagcagcgagcaggtgttgaaattccgtaaacttaacttcaatggggagggtgaacccgaagaactgatggtggacaactggcgcccagctcagccactgaagaacaggcaaatcaaagcttccttcaaa

SEQ ID NO: 6110 - DNA, 777 bp, Artificial Sequence; identical to SEQ ID NO: 5814
  source: /note="Description of Artificial Sequence: Synthetic Destabilizing Domain (DD)"

SEQ ID NO: 6111 - DNA, 777 bp, Artificial Sequence; identical to SEQ ID NO: 5880
  source: /note="Description of Artificial Sequence: Synthetic Destabilizing Domain (DD)"

SEQ ID NO: 6112 - DNA, 777 bp, Artificial Sequence; identical to SEQ ID NO: 5876
  source: /note="Description of Artificial Sequence: Synthetic Destabilizing Domain (DD)"

SEQ ID NO: 6113 - DNA, 777 bp, Artificial Sequence; identical to SEQ ID NO: 5816
  source: /note="Description of Artificial Sequence: Synthetic Destabilizing Domain (DD)"

SEQ ID NO: 6114 - DNA, 777 bp, Artificial Sequence; identical to SEQ ID NO: 5822
  source: /note="Description of Artificial Sequence: Synthetic Destabilizing Domain (DD)"

SEQ ID NO: 6115 - DNA, 777 bp, Artificial Sequence
  source: /note="Description of Artificial Sequence: Synthetic Destabilizing Domain (DD)"
tcccatcactgggggtacggcaaacacaacggacctgagcactggcataaggacttccccattgccaagggagagcgccagtcccctgttgacatcgacactcatacagccaagtatgacccttccctgaagcccctgtctgtttcctatgatcaagcaacttccctgaggaacctcaacaatggtcatgctttcaacgtggagtttgatgactctcaggacaaagcagtgctcaagggaggacccctggatggcacttacagattgattcagtttcactttcactggggttcacttgatggacaaggttcagagcatactgtggataaaaagaaatatgctgcagaacttcacttggttcactggaacaccaaatatggggattttgggaaagctgtgcagcaacctgatggactggccgttctaggtatttttttgaaggttggcagcgctaaaccgggccttcagaaagttgttgatgtgctggattccattaaaacaaagggcaagagtgctgacttcactaacttcgatcctcgtggcctccttcctgaatccctggattactggacctacccaggctcactgaccacccctcctcttctggaatgtgtgacctggattgtgctcaaggaacccatcagcgtcagcagcgagcaggtgttgaaattccgtaaacttaacttcaatggggagggtgaacccgaagaactgatggtggacaactggcgcccagctcagccactgaagaacaggcaaatcaaagcttccttcaaa

SEQ ID NO: 6116 - DNA, 777 bp, Artificial Sequence
  source: /note="Description of Artificial Sequence: Synthetic Destabilizing Domain (DD)"
tcccatcactgggggtacggcaaacacaacggacctgagcactggcataaggacttccccattgccaagggagagcgccagtcccctgttgacatcgacactcatacagccaagtatgacccttccctgaagcccctgtctgtttcctatgatcaagcaacttccctgaggatcctcaacaatgatcatgctttcaacgtggagtttgatgactctcaggacaaagcagtgctcaagggaggacccctggatggcacttacagattgattcagtttcactttcactggggttcacttgatggacaaggttcagagcatactgtggataaaaagaaatatgctgcagaacttcacttggttcactggaacaccaaatatggggattttgggaaagctgtgcagcaacctgatggactggccgttctaggtatttttttgaaggttggcagcgctaaaccgggccttcagaaagttgttgatgtgctggattccattaaaacaaagggcaagagtgctgacttcactaacttcgatcctcgtggcctccttcctgaatccctggattactggacctacccaggctcactgaccacccctcctcttctggaatgtgtgacctggattgtgctcaaggaacccatcagcgtcagcagcgagcaggtgttgaaattccgtaaacttaacttcaatggggagggtgaacccgaagaactgatggtggacaactggcgcccagctcagccactgaagaacaggcaaatcaaagcttccttcaaa

SEQ ID NO: 6117 - DNA, 777 bp, Artificial Sequence
  source: /note="Description of Artificial Sequence: Synthetic Destabilizing Domain (DD)"
tcccatcactgggggtacggcaaacacaacggacctgagcactggcataaggacttccccattgccaagggagagcgccagtcccctgttgacatcgacactcatacagccaagtatgacccttccctgaagcccctgtctgtttcctatgatcaagcaacttccctgaggatcctcaacaatggtcatgctttcaacgtggagtttgatgactctcaggacaaagcagtgctcaagggaggacccctggatggcacttacagattgattcagtttcactttcactggggttcacttgatggacaaggttcagagcatactgtggataaaaagaaatatgctgcagaacttcacttggtttactggaacaccaaatatggggattttgggaaagctgtgcagcaacctgatggactggccgttctaggtatttttttgaaggttggcagcgctaaaccgggccttcagaaagttgttgatgtgctggattccattaaaacaaagggcaagagtgctgacttcactaacttcgatcctcgtggcctccttcctgaatccctggattactggacctacccaggctcactgaccacccctcctcttctggaatgtgtgacctggattgtgctcaaggaacccatcagcgtcagcagcgagcaggtgttgaaattccgtaaacttaacttcaatggggagggtgaacccgaagaactgatggtggacaactggcgcccagctcagccactgaagaacaggcaaatcaaagcttccttcaaa

SEQ ID NO: 6118 - DNA, 777 bp, Artificial Sequence
  source: /note="Description of Artificial Sequence: Synthetic Destabilizing Domain (DD)"
tcccatcactgggggtacggcaaacacaacggacctgagcactggcataaggacttccccattgccaagggagagcgccagtcccctgttgacatcgacactcatacagccaagtatgacccttccctgaagcccctgtctgtttcctatgatcaagcaacttccctgaggatcctcaacaatgatcatgctttcaacgtggagtttgatgactctcaggacaaagcagtgctcaagggaggacccctggatggcacttacagattgattcagtttcactttcactggggttcacttgatggacaaggttcagagcatactgtggataaaaagaaatatgctgcagaacttcacttggttcactggaacaccaaatatggggattttgggaaagctgtgcagcaacctgatggactggccgttctaggtatttttttgaaggttggcagcgctaaaccgggccttcagaaagttgttgatgtgctggattccattaaaacaaagggcaagagtgctgacttcactaacttcgatcctcgtggcctccttcctgaatccctggattactggacctacccaggctcactgaccacccctcctcttctggaatgtgtgacctggattgtgctcaaggaacccatcagcgtcagcagcgagcaggtgttgaaattccgtaaacttaacttcaatggggagggtgaacccgaagaactgcttgtggacaactggcgcccagctcagccactgaagaacaggcaaatcaaagcttccttcaaa

SEQ ID NO: 6119 - DNA, 777 bp, Artificial Sequence
  source: /note="Description of Artificial Sequence: Synthetic Destabilizing Domain (DD)"
tcccatcactgggggtacggcaaacacaacggacctgagcactggcataaggacttccccattgccaagggagagcgccagtcccctgttgacatcgacactcatacagccaagtatgacccttccctgaagcccctgtctgtttcctatgatcaagcaacttccctgaggatcctcaacaatggtcatgctttcaacgtggagtttgatgactctcaggacaaaattgtgctcaagggaggacccctggatggcacttacagattgattcagtttcactttcactggggttcacttgatggacaaggttcagagcatactgtggataaaaagaaatatgctgcagaacttcacttggttcactggaacaccaaatatggggattttgggaaagctgtgcagcaacctgatggactggccgttctaggtatttttttgaaggttggcagcgctaaaccgggccttcagaaagttgttgatgtgctggattccattaaaacaaagggcaagagtgctgacttcactaacttcgatcctcgtggcctccttcctgaatccctggattactggacctacccaggctcactgaccacccctcctcttctggaatgtgtgacctggattgtgctcaaggaacccatcagcgtcagcagcgagcaggtgttgaaattccgtaaacttaacttcaatggggagggtgaacccgaagaactgatggtggacaactggcgcccagctcagtttctgaagaacaggcaaatcaaagcttccttcaaa

SEQ ID NO: 6120 - DNA, 777 bp, Artificial Sequence; identical to SEQ ID NO: 5694
  source: /note="Description of Artificial Sequence: Synthetic Destabilizing Domain (DD)"

SEQ ID NO: 6121 - DNA, 777 bp, Artificial Sequence; identical to SEQ ID NO: 5760
  source: /note="Description of Artificial Sequence: Synthetic Destabilizing Domain (DD)"

SEQ ID NO: 6122 - DNA, 777 bp, Artificial Sequence
  source: /note="Description of Artificial Sequence: Synthetic Destabilizing Domain (DD)"
tcccatcactgggggtacggcaaacacaacggacctgagcactggcataaggacttccccattgccaagggagagctccagtcccctgttgacatcgacactcatacagccaagtatgacccttccctgaagcccctgtctgtttcctatgatcaagcaacttccctgaggatcctcaacaatggtcatgctttcaacgtggagtttgatgactctcaggacaaagcagtgctcaagggaggacccctggatggcacttacagattgattcagtttcactttcactggggttcacttgatggacaaggttcagagcatactgtggataaaaagaaatatgctgcagaacttcacttggtttactggaacaccaaatatggggattttgggaaagctgtgcagcaacctgatggactggccgttctaggtatttttttgaaggttggcagcgctaaaccgggccttcagaaagttgttgatgtgctggattccattaaaacaaagggcaagagtgctgacttcactaacttcgatcctcgtggcctccttcctgaatccctggattactggacctacccaggctcactgaccacccctcctcttctggaatgtgtgacctggattgtgctcaaggaacccatcagcgtcagcagcgagcaggtgttgaaattccgtaaacttaacttcaatggggagggtgaacccgaagaactgatggtggacaactggcgcccagctcagccactgaagaacaggcaaatcaaagcttccttcaaa

SEQ ID NO: 6123 - DNA, 777 bp, Artificial Sequence
  source: /note="Description of Artificial Sequence: Synthetic Destabilizing Domain (DD)"
tcccatcactgggggtacggcaaacacaacggacctgagcactggcataaggacttccccattgccaagggagagcgccagtcccctgttgacatcgacactcatacagccaagtatgacccttccctgaagcccctgtctgtttcctatgatcaagcaacttccctgaggatcctcaacaatggtcatgctttcaacgtggagtttgatgactctcaggacaaagcagtgctcaagggaggacccctggatggcatttacagattgattcagtttcactttcactggggttcacttgatggacaaggttcagagcatactgtggataaaaagaaatatgctgcagaacttcacttggtttactggaacaccaaatatggggattttgggaaagctgtgcagcaacctgatggactggccgttctaggtatttttttgaaggttggcagcgctaaaccgggccttcagaaagttgttgatgtgctggattccattaaaacaaagggcaagagtgctgacttcactaacttcgatcctcgtggcctccttcctgaatccctggattactggacctacccaggctcactgaccacccctcctcttctggaatgtgtgacctggattgtgctcaaggaacccatcagcgtcagcagcgagcaggtgttgaaattccgtaaacttaacttcaatggggagggtgaacccgaagaactgatggtggacaactggcgcccagctcagccactgaagaacaggcaaatcaaagcttccttcaaa

SEQ ID NO: 6124 - DNA, 777 bp, Artificial Sequence
  source: /note="Description of Artificial Sequence: Synthetic Destabilizing Domain (DD)"
tcccatcactgggggtacggcaaacacaacggacctgagcactggcataaggacttccccattgccaagggagagcgccagtcccctgttgacatcgacactcatacagccaagtatgacccttccctgaagcccctgtctgtttcctatgatcaagcaacttccctgaggatcctcaacaatggtcatgctttcaacgtggagtttgatgactctcaggacaaagcagtgctcaagggaggacccctggatggcacttacagattgattcagtttcactttcactggggttcacttgatggacaaggttcagagcatactgtggataaaaagaaatatgctgcagaacttcacttggtttactggaacaccaaatatggggattttgggaaagctgtgcagcaacctgatggactggccgttctaggtatttttttgaaggttggcagcgctaaaccgggccttcagaaagttgttgatgtgctggattccattaaaacaaagggcaagagtgctgacttcactaacttcgatcctcgtggcctccttcctgaatccctggattactggacctacccaggctcactgaccacccctcctcttctggaatgtgtgacctggattgtgctcaaggaacccatcagcgtcagcagcgagcaggtgttgaaattccgtaaacttaacttcaatggggagggtgaacccgaagaactgatggtggacaactggcgcccagctcagccactgaaggacaggcaaatcaaagcttccttcaaa

SEQ ID NO: 6125 - DNA, 777 bp, Artificial Sequence
  source: /note="Description of Artificial Sequence: Synthetic Destabilizing Domain (DD)"
tcccatcactgggggtacggcaaacacaacggacctgagcactggcataaggacttccccattgccaagggagagcgccagtcccctgttgacatcgacactcatacagccaagtatgacccttccctgaagcccctgtctgtttcctatgatcaagcaacttccctgaggatcctcaacaatggtcatgctttcaacgtggagtttgatttctctcaggacaaagcagtgctcaagggaggacccctggatggcacttacagattgattcagtttcactttcactggggttcacttgatggacaaggttcagagcatactgtggataaaaagaaatatgctgcagaacttcacttggttcactggaacaccaaatatggggattttgggaaagctgtgcagcaacctgatggactggccgttctaggtatttttttgaaggttggcagcgctaaaccgggccttcagaaagttgttgatgtgctggattccattaaaacaaagggcaagagtgctgacttcactaacttcgatcctcgtggcctccttcctgaatccctggattactggacctacccaggctcactgaccacccctcctcttctggaatgtgtgacctggattgtgctcaaggaacccatcagcgtcagcagcgagcaggtgttgaaattccgtaaacttaacttcaatggggagggtgaacccgaagaactgatgtttgacaactggcgcccagctcagccactgaagaacaggcaaatcaaagcttccttcaaa

SEQ ID NO: 6126 - DNA, 777 bp, Artificial Sequence
  source: /note="Description of Artificial Sequence: Synthetic Destabilizing Domain (DD)"
tcccatcactgggggtacggcaaacacaacggacctgagcactggcataaggacttccccattgccaagggagagcgccagtcccctgttgacatcgacactcatacagccaagtatgacccttccctgaagcccctgtctgtttcctatgatcaagcaacttccctgaggatcctcaacaatggtcatgctttcaacgtggagtttgatgactctcaggacaaagcagtgctcaagggaggacccctggatggcacttacagattgattcagtttcactttcactggggttcacttgatggacaaggttcagagcatactgtggataaaaagaaatatgctgcagaacttcacttggttcactggaacaccaaatatggggattttgggaaagctgtgcagcaacctgatggactggccgttctaggtatttttttgaaggttggcagcgctaaaccgggccttcagaaagttgttgatgtgctggattccattaaaacaaagggcaagagtgctgacttcactaacttcgatcctcgtggcctccttcctgaatccctggattactggacctacccaggctcactgaccacccctcctcttctggaatgtgtgacctggattgtgctcaaggaacccatcagcgtcagcagcgagcaggtgttgaaattccgtaaacttaacttcaatggggagggtgaacccgaagaactgatgtttgacaactggcgcccagctcagctactgaagaacaggcaaatcaaagcttccttcaaa

SEQ ID NO: 6127 - DNA, 777 bp, Artificial Sequence
  source: /note="Description of Artificial Sequence: Synthetic Destabilizing Domain (DD)"
tcccatcactgggggtacggcaaacacaacggacctgagcactggcataaggacttccccattgccaagggagagcgccagtcccctgttgacatcgacactcatacagccaagtatgacccttccctgaagcccctgtctgtttcctatgatcaagcaacttccctgaggatcctcaacaatggtcatgctttcaacgtggagtttgatttctctcaggacaaagcagtgctcaagggaggacccctggatggcacttacagattgattcagtttcactttcactggggttcacttgatggacaaggttcagagcatactgtggataaaaagaaatatgctgcagaacttcacttggttcactggaacaccaaatatggggattttgggaaagctgtgcagcaacctgatggactggccgttctaggtatttttttgaaggttggcagcgctaaaccgggccttcagaaagttgttgatgtgctggattccattaaaacaaagggcaagagtgctgacttcactaacttcgatcctcgtggcctccttcctgaatccctggattactggacctacccaggctcactgaccacccctcctcttctggaatgtgtgacctggattgtgctcaaggaacccatcagcgtcagcagcgagcaggtgttgaaattccgtaaacttaacttcaatggggagggtgaacccgaagaactgatggtggacaactggcgcccagctcagctactgaagaacaggcaaatcaaagcttccttcaaa

SEQ ID NO: 6128 - DNA, 777 bp, Artificial Sequence
  source: /note="Description of Artificial Sequence: Synthetic Destabilizing Domain (DD)"
tcccatcactgggggtacggcaaacacaacggacctgagcactggcataaggacttccccattgccaagggagagcgccagtcccctgttgacatcgacactcatacagccaagtatgacccttccctgaagcccctgtctgtttcctatgatcaagcaacttccctgaggatcctcaacaatggtcatgctttcaacgtggagtttcttgactctcaggacaaagcagtgctcaagggaggacccctggatggcaattacagattgattcagtttcactttcactggggttcacttgatggacaaggttcagagcatactgtggataaaaagaaatatgctgcagaacttcacttggttcactggaacaccaaatatggggattttgggaaagctgtgcagcaacctgatggactggccgttctaggtatttttttgaaggttggcagcgctaaaccgggccttcagaaagttgttgatgtgctggattccattaaaacaaagggcaagagtgctgacttcactaacttcgatcctcgtggcctccttcctgaatccctggattactggacctacccaggctcactgaccacccctcctcttctggaatgtgtgacctggattgtgctcaaggaacccatcagcgtcagcagcgagcaggtgttgaaattccgtaaacttaacttcaatggggagggtgaacccgaagaactgatggtggacaactggcgcccagctcagccactgaagaacaggcaaatcaaagcttccttcaaa

SEQ ID NO: 6129 - DNA, 777 bp, Artificial Sequence
  source: /note="Description of Artificial Sequence: Synthetic Destabilizing Domain (DD)"
tcccatcactgggggtacggcaaacacaacggacctgagcactggcataaggacttccccattgccaagggagagcgccagtcccctgttgacatcgacactcatacagccaagtatgacccttccctgaagcccctgtctgtttcctatgatcaagcaacttccctgaggatcctcaacaatggtcatgctttcaacgtggagtttcttgactctcaggacaaagcagtgctcaagggaggacccctggatggcacttacagattgattcagtttcactttcactggggttcacttgatggacaaggttcagagcatactgtggataaaaagaaatatgctgcagaacttcacttggttcactggaacaccaaatatggggattttgggaaagctgtgcagcaacctgatggactggccgttctaggtatttttttgaaggttggcagcgctaaaccgggccttcagaaagttgttgatgtgctggattccattaaaacaaagggcaagagtgctgacttcactaacttcgatcctcgtggcctccttcctgaatccctggattactggacctacccaggctcactgaccacccctcctcttctggaatgtgtgacctggattgtgctcaaggaacccatcagcgtcagcagcgagcaggtgttgaaattccgtaaacttaacttcaatggggagggtgaacccgaagaactgatggtggacaactggcgcccagctcagccacggaagaacaggcaaatcaaagcttccttcaaa

SEQ ID NO: 6130 - DNA, 777 bp, Artificial Sequence; identical to SEQ ID NO: 5661
  source: /note="Description of Artificial Sequence: Synthetic Destabilizing Domain (DD)"

SEQ ID NO: 6131 - DNA, 777 bp, Artificial Sequence; identical to SEQ ID NO: 5722
  source: /note="Description of Artificial Sequence: Synthetic Destabilizing Domain (DD)"

SEQ ID NO: 6132 - DNA, 777 bp, Artificial Sequence; identical to SEQ ID NO: 5678
  source: /note="Description of Artificial Sequence: Synthetic Destabilizing Domain (DD)"

SEQ ID NO: 6133 - DNA, 777 bp, Artificial Sequence
  source: /note="Description of Artificial Sequence: Synthetic Destabilizing Domain (DD)"
tcccatcactgggggtacggcaaacacaacggacctgagcactggcataaggacttccccattgccaagggagagcgccagtcccctgttgacatcgacactcatacagccaagtatgacccttccctgaagcccctgtctgtttcctatgatcaagcaaagtccctgaggatcctcaacaataatcatgctttcaacgtggagtttgatgactctcaggacaaagcagtgctcaagggaggacccctggatggcacttacagattgattcagtttcactttcactggggttcacttgatggacaaggttcagagcatactgtggataaaaagaaatatgctgcagaacttcacttggttcactggaacaccaaatatggggattttgggaaagctgtgcagcaacctgatggactggccgttctaggtatttttttgaaggttggcagcgctaaaccgggccttcagaaagttgttgatgtgctggattccattaaaacaaagggcaagagtgctgacttcactaacttcgatcctcgtggcctccttcctgaatccctggattactggacctacccaggctcactgaccacccctcctcttctggaatgtgtgacctggattgtgctcaaggaacccatcagcgtcagcagcgagcaggtgttgaaattccgtaaacttaacttcaatggggagggtgaacccgaagaactgatggtggacaactggcgcccagctaatccactgaagaacaggcaaatcaaagcttccttcaaa

SEQ ID NO: 6134 - DNA, 777 bp, Artificial Sequence; identical to SEQ ID NO: 5689
  source: /note="Description of Artificial Sequence: Synthetic Destabilizing Domain (DD)"

SEQ ID NO: 6135 - DNA, 777 bp, Artificial Sequence; identical to SEQ ID NO: 5668
  source: /note="Description of Artificial Sequence: Synthetic Destabilizing Domain (DD)"

SEQ ID NO: 6136 - DNA, 777 bp, Artificial Sequence; identical to SEQ ID NO: 5744
  source: /note="Description of Artificial Sequence: Synthetic Destabilizing Domain (DD)"

SEQ ID NO: 6137 - DNA, 777 bp, Artificial Sequence; identical to SEQ ID NO: 5692
  source: /note="Description of Artificial Sequence: Synthetic Destabilizing Domain (DD)"

SEQ ID NO: 6138 - DNA, 777 bp, Artificial Sequence; identical to SEQ ID NO: 5740
  source: /note="Description of Artificial Sequence: Synthetic Destabilizing Domain (DD)"

SEQ ID NO: 6139 - DNA, 765 bp, Artificial Sequence
  source: /note="Description of Artificial Sequence: Synthetic Destabilizing Domain (DD)"
tcccatcactgggggtacggcaaacacaacggacctgagcactggcataaggacttccccattgccaagggagagcgccagtcccctgttgacatcgacactcatacagccaagtatgacccttccctgaagcccctgtctgtttcctatgatcaagcaacttccctgaggatcctcaacaatggtcatgctttcaacgtggagtttgatgactctcaggacaaagcagtgctcaagggaggacccctggatggcacttacagattgattcagtttcactttcactggggttcacttgatggacaaggttcagagcatactgtggataaaaagaaatatgctgcagaacttcacttggttcactggaacaccaaatatggggattttgggaaagctgtgcagcaacctgatggactggccgttctaggtatttttttgaaggttggcagcgctaaaccgggccatcagaaagttgttgatgtgctggattccattaaaacaaagggcaagagtgctgacttcactaacttcgatcctcgtggcctccttcctgaatccctggattactggacctacccaggctcactgaccacccctcctcttctggaatgtgtgacctggattgtgctcaaggaacccatcagcgtcagcagcgagcaggtgttgaaattccgtaaacttaacttcaatggggagggtgaacccgaagaactgatggtggacaactggcgcccagctcagccactgaagaacaggcaaatcaaa

SEQ ID NO: 6140 - DNA, 765 bp, Artificial Sequence
  source: /note="Description of Artificial Sequence: Synthetic Destabilizing Domain (DD)"
gggtacggcaaacacaacggacctgagcactggcataaggacttccccattgccaagggagagcgccagtcccctgttgacatcgacactcatacagccaagtatgacccttccctgaagcccctgtctgtttcctatgatcaagcaacttccctgaggatcctcaacaatggtcatgctttcaacgtggagtttgatgactctcaggacaaagcagtgctcaagggaggacccctggatggcacttacagattgattcagtttcactttcactggggttcacttgatggacaaggttcagagcatactgtggataaaaagaaatatgctgcagaacttcacttggttcactggaacaccaaatatggggattttgggaaagctgtgcagcaacctgatggactggccgttctaggtatttttttgaaggttggcagcgctaaaccgggccatcagaaagttgttgatgtgctggattccattaaaacaaagggcaagagtgctgacttcactaacttcgatcctcgtggcctccttcctgaatccctggattactggacctacccaggctcactgaccacccctcctcttctggaatgtgtgacctggattgtgctcaaggaacccatcagcgtcagcagcgagcaggtgttgaaattccgtaaacttaacttcaatggggagggtgaacccgaagaactgatggtggacaactggcgcccagctcagccactgaagaacaggcaaatcaaagcttccttcaaa

SEQ ID NO: 6141 - DNA, 777 bp, Artificial Sequence
  source: /note="Description of Artificial Sequence: Synthetic Destabilizing Domain (DD)"
tcccatcactacgggtacggcaaacacaacggacctgagcactggcataaggacttccccattgccaagggagagcgccagtcccctgttgacatcgacactcatacagccaagtatgacccttccctgaagcccctgtctgtttcctatgatcaagcaacttccctgaggatcctcaacaatggtcatgctttcaacgtggagtttgatgactctcaggacaaagcagtgctcaagggaggacccctggatggcacttacagattgattcagtttcactttcactggggttcacttgatggacaaggttcagagcatactgtggataaaaagaaatatgctgcagaacttcacttggttcactggaacaccaaatatggggattttgggaaagctgtgcagcaacctgatggactggccgttctaggtatttttttgaaggttggcagcgctaaaccgggccatcagaaagttgttgatgtgctggattccattaaaacaaagggcaagagtgctgacttcactaacttcgatcctcgtggcctccttcctgaatccctggattactggacctacccaggctcactgaccacccctcctcttctggaatgtgtgacctggattgtgctcaaggaacccatcagcgtcagcagcgagcaggtgttgaaattccgtaaacttaacttcaatggggagggtgaacccgaagaactgatggtggacaactggcgcccagctcagccactgaagaacaggcaaatcaaagcttccttcaaa

SEQ ID NO: 6142 - DNA, 768 bp, Artificial Sequence
  source: /note="Description of Artificial Sequence: Synthetic Destabilizing Domain (DD)"
tcccatcactgggggtacggcaaacacaacggacctgagcactggcataaggacttccccattgccaagggagagcgccagtcccctgttgacatcgacactcatacagccaagtatgacccttccctgaagcccctgtctgtttcctatgatcaagcaacttccctgaggatcctcaacaatggtcatgctttcaacgtggagtttgatgactctcaggacaaagcagtgctcaagggaggacccctggatggcacttacagattgattcagtttcactttcactggggttcacttgatggacaaggttcagagcatactgtggataaaaagaaatatgctgcagaacttcacttggttcactggaacaccaaatatggggattttgggaaagctgtgcagcaacctgatggactggccgttctaggtatttttttgaaggttggcagcgctaaaccgggccatcagaaagttgttgatgtgctggattccattaaaacaaagggcaagagtgctgacttcactaacttcgatcctcgtggcctccttcctgaatccctggattactggacctacccaggctcactgaccacccctcctcttctggaatgtgtgacctggattgtgctcaaggaacccatcagcgtcagcagcgagcaggtgttgaaattccgtaaacttaacttcaatggggaggaagaactgatggtggacaactggcgcccagctcagccactgaagaacaggcaaatcaaagcttccttcaaa

SEQ ID NO: 6143 - DNA, 777 bp, Artificial Sequence
  source: /note="Description of Artificial Sequence: Synthetic Destabilizing Domain (DD)"
tcccatcactgggggtacggcaaacacaacggacctgagcactggcataaggacttccccattgccaagggagagcgccagtcccctgttgacatcgacactcatacagccaagtatgacccttccctgaagcccctgtctgtttcctatgatcaagcaacttccctgaggatcctcaacaatggtcatgctttcaacgtggagtttgatgactctcaggacaaagcagtgctcaagggaggacccctggatggcacttacagattgattcagtttcactttcactggggttcacttgatggacaaggttcagagcatactgtggataaaaagaaatatgctgcagaacttcacttggttcactggaacaccaaatatggggattttgggaaagctgtgcagcaacctgatggactggccgttctaggtatttttttgaaggttggcagcgctaaaccgggccatcagaaagttgttgatgtgctggattccattaaaacaaagggcaagagtgctgacttcactaacttcgatcctcgtggcctccttcctgaatccctggattactggacctacccaggctcactgaccacccctcctcttctggaatgtgtgacctggattgtgctcaaggaacccatcagcgtcagcagcgagcaggtgttgaaactccgtaaacttaacttcaatggggagggtgaacccgaagaactgatggtggacaactggcgcccagctcagccactgaagaacaggcaaatcaaagcttccttcaaa

SEQ ID NO: 6144 - DNA, 777 bp, Artificial Sequence
  source: /note="Description of Artificial Sequence: Synthetic Destabilizing Domain (DD)"
tcccatcactgggggtacggcaaacacaacggacctgagcactggcataaggacttccccattgccaagggagagcgccagtcccctgttgacatcgacactcatacagccaagtatgacccttccctgaagcccctgtctgtttcctatgatcaagcaacttccctgaggatcctcaacaatggtcatgctttcaacgtggagtttaatgactctcagaacaaagcagtgctcaagggaggacccctggatggcacttacagattgattcagtttcactttcactggggttcacttaatggacaaggttcagagcatactgtggataaaaagaaatatgctgcagaacttcacttggttcactggaacaccaaatatggggattttgggaaagctgtgcagcaacctgatggactggccgttctaggtatttttttgaaggttggcagcgctaaaccgggccatcagaaagttgttgatgtgctggattccattaaaacaaagggcaagagtgctgacttcactaacttcgatcctcgtggcctccttcctgaatccctggattactggacctacccaggctcactgaccacccctcctcttctggaatgtgtgacctggattgtgctcaaggaacccatcagcgtcagcagcgagcaggtgttgaaattccgtaaacttaacttcaatggggagggtgaacccgaagaactgatggtggacaactggcgcccagctcagccactgaagaacaggcaaatcaaagcttccttcaaa

1. A polypeptide comprising an effector module, said effector module comprising:
i) a stimulus response element (SRE), wherein the SRE comprises a drug responsive domain (DRD), said DRD comprising human carbonic anhydrase 2 (CA2; SEQ ID NO. 5810) or a region thereof, and further comprising one or more mutations relative to the amino acid sequence of SEQ ID NO. 5810; and
ii) at least one payload which is operably linked to the SRE, wherein:
(a) the payload comprises CD40L (SEQ ID NO. 6) or a portion thereof, or
(b) the payload comprises CD40L (SEQ ID NO. 6) or a portion thereof comprising one or more mutations relative to the amino acid sequence of SEQ ID NO. 6.

2. The polypeptide of claim 1, wherein the DRD comprises a H122Y mutation in the amino acid at position 122 (H122) of SEQ ID NO. 5810.

3. The polypeptide of claim 2, wherein the DRD further comprises:
(i) a R27L mutation in the amino acid at position 27 (R27) of SEQ ID NO. 5810;
(ii) a T87I mutation in the amino acid at position 87 (T87) of SEQ ID NO. 5810;
(iii) a N252D mutation in the amino acid at position 252 (N252) of SEQ ID NO. 5810; or
(iv) a combination of (i), (ii) and/or (iii).

4. The polypeptide of claim 1, wherein the DRD comprises a E106D mutation in the amino acid at position 106 (E106) of SEQ ID NO. 5810.

5. The polypeptide of claim 1, wherein the DRD comprises a W208S mutation in the amino acid at position 208 (W208) of SEQ ID NO. 5810.

6. The polypeptide of claim 4, wherein the DRD further comprises a C205S mutation in the amino acid at position 205 (C205) of SEQ ID NO. 5810.

7. The polypeptide of claim 1, wherein the DRD comprises a I59N mutation in the amino acid at position 59 (I59) of SEQ ID NO. 5810.

8. The polypeptide of claim 7, wherein the DRD further comprises a G102R mutation in the amino acid at position 102 (G102) of SEQ ID NO. 5810.

9. The polypeptide of claim 1, wherein the DRD comprises a L156H mutation in the amino acid at position 156 (L156) of SEQ ID NO. 5810.

10. The polypeptide of claim 9, wherein the DRD further comprises:
(i) a W4Y mutation in the amino acid at position 4 (W4) of SEQ ID NO. 5810;
(ii) a F225L mutation in the amino acid at position 225 (F225) of SEQ ID NO. 5810;
(iii) deletion of amino acids at positions 257-260 of SEQ ID NO. 5810;
(iv) deletion of amino acids at positions 1-5 of SEQ ID NO. 5810; or
(v) deletion of amino acids G234, E235 and P236 of SEQ ID NO. 5810.

11. The polypeptide of claim 9, wherein the DRD comprises four mutations relative to SEQ ID NO. 5810, said mutations corresponding to:
(i) L156H, S172C, F178Y, and E186D; or
(ii) D70N, D74N, D100N, and L156H.

12. The polypeptide of claim 1, wherein the DRD comprises a first mutation and a second mutation relative to SEQ ID NO. 5810, wherein:
(i) the first mutation is a S73N mutation in the amino acid at position 73 (S73) of SEQ ID NO. 5810; and
(ii) the second mutation is a substitution of F or Y at the amino acid position 89 (R89) of SEQ ID NO. 5810.

13. The polypeptide of claim 1, wherein the DRD comprises a substitution of N or F at the amino acid position 56 (S56) of SEQ ID NO. 5810.

14. The polypeptide of claim 13, wherein the DRD comprises a S56N mutation in the amino acid at position 56 (S56) of SEQ ID NO. 5810.

15. The polypeptide of claim 13, wherein the DRD comprises two substitutions relative to SEQ ID NO. 5810 that correspond to S56F and D71S.

16. The polypeptide of claim 1, wherein the DRD comprises one or more substitutions relative to SEQ ID NO. 5810, wherein at least one substitution is a substitution of D or N at the amino acid position 63 (G63) of SEQ ID NO. 5810, and wherein the one or more substitutions correspond to:
G63D;
G63D and M240L;
G63D, E69V and N231I; or
T55K, G63N and Q248N.

17. The polypeptide of claim 1, wherein the DRD comprises two or more substitutions relative to SEQ ID NO. 5810, wherein one of the two or more substitutions is a substitution of L or K at the amino acid position 71 (D71) of SEQ ID NO. 5810, and wherein said two or more substitutions correspond to:
D71L and T87N;
D71L and L250R;
D71L, T87N and L250R; or
D71K and T192F.

18. The polypeptide of claim 1, wherein the DRD comprises two or more substitutions relative to SEQ ID NO. 5810, wherein at least one of the two or more substitutions is:
(i) a substitution of F at the amino acid position 241 (V241) of SEQ ID NO. 5810; or
(ii) a substitution of F or L at the amino acid position 249 (P249) of SEQ ID NO. 5810; and
wherein the two or more substitutions correspond to:
D72F and V241F;
D72F and P249L;
D72F and P249F;
D72F, V241F and P249L;
A77I and P249F; or
V241F and P249L.

19. The polypeptide of claim 1, wherein the DRD comprises one or more substitutions relative to SEQ ID NO. 5810, selected from Y51T, L183S, Y193I, L197P and the combination of V134F and L228F.

20. The polypeptide of claim 1, wherein the DRD comprises the region of human CA2 corresponding to amino acids 2 to 260 of SEQ ID NO. 5810.

21. The polypeptide of claim 1, wherein the DRD comprises the region of human CA2 corresponding to the full-length CA2 comprising amino acids 1 to 260 of SEQ ID NO. 5810.

22. The polypeptide of claim 1, wherein the SRE is responsive to one or more small molecules selected from Acetazolamide, Celecoxib, Valdecoxib, Rofecoxib, Methazolamide, Dorzolamide, Brinzolamide, Diclofenamide, Ethoxzolamide, Zonisamide, Dansylamide, or Dichlorphenamide.

23. (canceled)

24. (canceled)

25. The polypeptide of claim 1, wherein the payload is CD40L (SEQ ID NO. 6) or a portion thereof comprising at least one mutation.

26. The polypeptide of claim 1, wherein the payload is CD40L (SEQ ID NO. 6) or a portion thereof comprising at least two mutations, wherein the at least two mutations are selected from:
(i) H224G and G226F;
(ii) H224G and G226H;
(iii) Y172G and G226F;
(iv) H125 and G227;
(v) Y120G, H224G and G226W; and
(vi) S110G, F111G, E112S, M113G, Q114G, and K115S.

27-31. (canceled)

32. A polynucleotide encoding the polypeptide of claim 1, wherein the polynucleotide is a DNA molecule or an RNA molecule.

33-37. (canceled)

38. A vector comprising the polynucleotide of claim 32.

39. (canceled)

40. A cell comprising the vector of claim 38.

41-54. (canceled)
